United States Patent Application Publication US 2023/0348939 A1 - sequence listing, part 2

SEQ ID NO: 2331 - protein, 932 aa, synthetic construct
  source 1..932: note = Description of Artificial Sequence: Synthetic polypeptide
MRWIGQGCLRKKNCDIYYSCHPERHEFGCGFVVGARLRRRVSHFLPINERLATIRITAKFFNISLICAHAPTEEKDDVTKDAFYAELDRAYGRCPSHDIKILLGDFNAKVGREDIFGATVGQFSLHETTSSNGLRLIGFAAAHNMVVRSTGFRHLDIHKASWLSPDRLTRNQIDHVVIDARHASNVLDVRSCRGPNIDSDHYLVAAKIRTRLCVAKVARRGLLRKLDIGKLQSQRTRDAFSTQVTGLLSRATPTPEDISNMWALISHSLRTSAEEVIGFQRTPKRNPWYDQECRDATAAKDAAYGRTLQAGATRAVVEVYRSRRRDEKRLFRRKKREQERRECESIESSRDRNEARNFYQRVKRLTQGFKTGGVACKDDDGNLITDAEIVLRLWRDHFSSLLAGSGHDDYGEYDPQTPIYGTDVDVPTPSHAEVKDAIQRLKNNKTAGADGLPAELFKAAGDMLVGSMHKLISKIWLTESMPDDWNHSMICPILKKGDATLRTNYRGISLLPVAYKVLTSVLCENLKPHAEALIGPYQCGFRPGKSTIDQIFTLRQILEKSYENQIDTYHLFVDYKAAFDSPRRDRLYAAMSELGIPAKLIRLCMMTLSNTISSVRVGNDQSETFYTKCGLRQGDSLSCMLFNILMESIIRKAGVHRTGTILTNRCVQLLGYADDIDIIGRTKRDVTAAFGAIEKESAKVGLAVNMDKTKFMVCSSRESRRLDSQLSAGSHSFESVKEFIYLGSAISSTNDVSLEIKRRITLANRCYFGLSRHFNSRALSRPTKITLYRTLILPVLLYGAECWTVVQSDAAALGVFERKILRKIFGPICVGDAYRTRWNHELYELYGDVDIVSRVKIQRLRWLGHIARMEEDAPARKVFDAVIVGKRRRGRPRIRWQDQVMEALSTSGVTNWRARAQDRKAWRQIVQQAVTR

SEQ ID NO: 2332 - protein, 883 aa, synthetic construct
  source 1..883: note = Description of Artificial Sequence: Synthetic polypeptide
MQDIDDAIEIFNRNIYHAAKIATRHIKTSNRNPTGQFLLDRKLLNLQAIKKYTKQIKMARQTPEAAKNYKAANERFLRAIKEAKTKRTNNILNKIDPLDRYRMQKLWKITNHFKRQPEPNWPLKLYTGDGTSAKDWYSWTKSSEEKTEAFTRHLEERFSPKLTNSESFRAHVISKKEEICTQKLLMTTPCWMHRENYGHNSDKTNLPFLPITPNEVLAEVKLLQNKKAPGPDQIDNKLIKLLPHKATLHLTHIYNCMLRYSYFPKQWKRAAITMIKKPGKTPHEVSSYRPISLLPGFSKIFETLLMHRMFKIQDFERAIPSHQFGFRKQHSTEQQLLRVTQHILSAYEQKMYCSAVFIDVSEAFDRVWHDGLLLKLAKLLPHSLYKILQSYLTDRSFTMNSTNGIPSRTGKISAGVPQGSVLGPILYTVFTSDMPLPEVISSQHTYNPSYFENMMLSTYADDTIILCTKREPQLAIQTTESFLKYITDWATSWCITLNPNKTIHVLFTKRSVANLTGNKSPKMKGILIKNEPKHRYLGLILDRKLLLHHHINQLQNRIRNVAAGLNWIIGTKSKLSPQSKILLYKQIIAPIWQYALPLWGALTSNTQFQRIEAAQSKLIRKILKAGRYTRNQVLRDAYNIKSINEIYSEASNRLATSLASHPNTEARKILMDPVTPNRLEMPRYLDQLNRFFLPLRQQLQQQNQLNTHQPALPTLISYEQQLLSQQASIKARQQDEEREQNKRLKIEQDPHYRPSIGWVNAMSYKLRHGITTRWEMADKIKYEPEYIQRLIMSPLLPSEIPPPTPDQELDARLSTLKTQIINDLDLNLNYETNLAEGDSRTRFLPNSSSPILQAPQIPCINLVEDHPLGNPAIADIWKSTPEI

SEQ ID NO: 2333 - protein, 1071 aa, synthetic construct
  source 1..1071: note = Description of Artificial Sequence: Synthetic polypeptide
MSSFGLIVTNLNSETVLWGCQPLGQFSLIGTNMQNTTPRIINTNSLTNQIPTVSSLGAQSEHSAQVNPNSGYQCTICESSFRSKSGLGVHMSRRHKDEFDQLRLRTDRKAQWSEEELSMMARKEIELAANGERYLNKKLAEVFTNRSVDAIKKCRQRERYKTKIEQLKGQAVPLPEALESETIQRRPSIRERDLLVTPPNTLGTTPTELSNSEILAVLQGYPPVVCNDQWRVEVLQSIVDGAQASGKEITLQRLSTYLMEVFPSQNDRPIQTRPPRRPRNRRQGRRQQYALTQRNWDKHKGRCIKAILDGTEGTATMPSQGIMGSYWRQVMTQTSPTYSGTNTTFRTEHPLEGVWSPITLGDLRVHRVSLTKSPGPDGITPRTVRSIPSGVMLRIMNLILWCGKLPVSIRQARTIFIPKVGNASRPQDFRPITVQSVMVRILNAILASRLTSSVDWDPRQRGFLPTDGCADNTTIVDLILRDHHKRCKSLYIATLDISKAFDSVSHAAVSATLTAYGAPKEFVDYVQNSYEVCGTTLNGDGWRSEEFIPARGVRQGDPLSPIIFNLIIDQLLRSYPNEIGATIGDHTTNAAAFADDIVLFAETRLGLQTMLDTTVDFLSSVGLTLNSDKCFTVGIKGQPKQKCTVVIPETFRIGSRSCPALKRTDEWKYLGITFTAQGRTRYSPADDLGPKLLRLTRSPLKPQQKLFALRTVLIPQLYHKLTLGSVMIGVLRKCDILVRSTVRKWLGLPLDVSTAFFHAPHTYGGLGIPSVRWVAPMLRMKRLSNIKWAHLAQSEAASSFLTDELNKARGRTLAGLNELTSRTEIETYWANRLYMSVDGRGLREAGLFRPQHGWVCQPTRLLTGQDYRNSIKLRINALPSRSRTTRGRNELERQCRAGCDAPETTNHILQNCYRTHGRRVARHNCVVNNLKRILEEKGHTVHVEPSLQLETSVSKPDLVCIRDNHACVIDAQIITDGLFLDDVHHRKVEKYKRPEVISALRREFGVSGNVEVLSATLNWRGIWSNQSVRRLIAKGLISSGDSNVISARVVTGGLYCFRQFMYLAGYTRDWT

SEQ ID NO: 2334 - protein, 705 aa, synthetic construct
  source 1..705: note = Description of Artificial Sequence: Synthetic polypeptide
MNILNKEISLSKNKHLNKKLCKIDSSDRYRPHKLWQLTNKLKRQPLPNWPLRIPSGVDKKHAWTRSPEGKMELFTDQLEKRFSPNLTNSSLDRAKINEETNAILAQKMLMEYACKTHHSIASSSANFDSSNSPFVKPITLSELKKEIDSLINKKAPGYDRINNALIKVLPLKAIIFLLKIYNSILRFGHFPLVWKKAIVVMVKKPKKTISDASSYRPISLLPAFSKILESLIAKRLLKFNRLSQSIPNHQFGFRKFHGAEHQLARVTQFLQRAFEDKLYGSPIFIDITEAFGKVWHCGLRNKLIKLLPINLYKVLDSYLKDRTFSVRGNHGIMSRDGKILAGIPQGSVLGPLLYNIYSSDMPIPKFIIEHETLIEYYPTYKHGDTLLSTYADDTIFISTDKNALVAMNKTENYLHKFSTWSNKWCFTVNVSKTVHVLFSRRSTSPAVKAATVKFNNKPIKNTSSCRYLGVLVDSKLLFKTHIAKLCAQAKSTYTRYKWLGGAKSHLSTRCKVTIYKQILVPIWTYAIPIWGSLISNTLFKKLTGTHNKLLRKLTNANIYCPNSEIQEKHNAKPLETIYNDACLRFFNSMSDHETKEIEKLYLKPFIPKRLPWPRYSKQIDKLVASRTIKKAQTPPLMPPLNPSVTVTNIKLRIESKLMEFFSKAPALIADNCHQTYNRITEKQDVLRAKEASIARKNRQKIQSGH

SEQ ID NO: 2335 - protein, 1321 aa, synthetic construct
  source 1..1321: note = Description of Artificial Sequence: Synthetic polypeptide
MPLFKSLDIWKYVNLTLLPPLPPSSSSPPLPPSSSPLPPSSSPLPPSSSPLPPSSSPLPPSSSPLPPSSSPLPPSSSPLPPSSSPLPPSSSPLPPSSSPLPPSSSPLPPSSSPLPPSSSPLPPPSSSSSRPHPGPRKKRNKQKKRTGPRKCPPPTSSRPLPHTTEGLNPVSDDLFCPVSGCPGPSSSATDEWIECSACLLWYHTSCLLLQAIPEDDWFCANCPQIHTQIGPQVNSNTPSPANQSTLGTHSQIIQSSPCTNPRASQPISTLSTPLSNFISSKATCTSLTLEWLNNNIVPGGIIEKNLLHEAYRQDSLGIFKPLNDAEIGKLIKNSFSNIRTKRLRTEFHGASKYHYVGIQLKSEQVPETVFDFKSIISSLRQNCPTLKQCPKACRIPVAQSIKSAIDKCITENTPEAWHLLLTFPYVTLQCDSRANIKNGQSLNNKIRNNLSIFESLDKNTYQDYLISLSSKNSVFDKSGSKINDIGPKVISKVSEGNIRGAIRLLTSDDVVAPNSSATLDTLVEKHPQQSLDNFTVLDEPNIPPFTTTTEQVISAIFSFPSGSAGGLDALRPQILKDLVSQHTGDVGTQLLESLTKFCNFMLAGKVPLDICPFIYGASLTALKKKSGGIRPIAVGCTYRRIVSKICVKVMNHVFQDYFSPVQVGFNVKNGAEAGAHAARRFFSFPHQSPTAFLKIDFKNAFNMVDRGKLLSSVHELVPTLYPYINQCYRFSSSLVWNSSLIDSCRGVQQGDPLGPPLFCLTLHPVISNLGSEFNMWYLDDGTLGGNPTTVLDDFQHIISCANEVGLELNFDKCEVSVLGPQTNTQCILESFQSVAPGISCMTQENAELLGAPLTLESIEHVFRKKIHAFTNMAGRLHSIPSHIAYYLLKHSLAIPRLVYLLRAAPIFKSPHLLEEFDSLLHNALEQITNCQINPLSLEEIALPIKLGGLGIRQSKTLATPCFLASSFATTDLVSLILPSYVTALSDSLVTEAQDLWKSISCEELPRSTITSFQSSWESPIFNYVSSRILESSTTPINTARILASRSKESGAWLQALPSRNLGTLLDDNSFRIAIGLRLGLNLCFPHKCVCGAQVDELGLHGLSCKKSAGRHSRHTQANDIIKRALISADIPSIREPLGCCRTDGKRPDGLTLIPYKQGRSLIWDFTCTDTFAPSYLSHTLRHAGTAAKLAETKKHKLYSELKTNYIFVPVAIETSGVWGTEGLKFIQDVGRRMKDVTGPMSTTFLIQRISLAVQRGNAASIMGAVPSQRGLEELFYILNDRSFYLQKSCKGPNGDLGRLSGSSKGFPNPPTSGFSSTPQAN

SEQ ID NO: 2336 - protein, 1004 aa, synthetic construct
  source 1..1004: note = Description of Artificial Sequence: Synthetic polypeptide
MIILSYNSRGLGRGVKWAAVRRLIVKHKVDLVCLQETKRENFNKSICQAIWGDSTGHWDFVPSVQAAGGLLCMWNNSTFVVERKEKGRSFLMLEGTCCSNNQKLIFVNVYAPCDLVGKKALWDELRQLKASNPSGMWCFLGDFNSIRSSQERISLSQRRADPYDIAAFNQWIDDMELQEIKCYGNSFTWIRPNGCVKSRLDRFLVSQNWLSLWPESCQTVLQRNLSDHCPSILQTNMVDWGPKPFRVFDWWLQQKGYQKMVREAWKKDQQGGWGGIALKNKLKNLKSVIKCWSKAEGNINPKKVLNIQQKLNEVEDLAAHRNLTDQEIKDRTLLQQELWNASNAFESLLRQKSRARWLKEGDYNTAYFHKYMNFRRAYNNIPGIFIYGEWIQQPDAVKNEAANFFHNRFTEQMHSRPTLDGVHFKSISQRQREQLTVPFSDQEIKQAVWSCGGDKCPGPDGLNFNFIKEFWDVLNPEFRRFVDEFYAHESFPRGSNASFVALIPKKSHPQSLNDYRPISLIGCMYKVIAKLLSNRLRSVMDELIDERQSAFIKERHILHGILILNEVVEEAMRSKKPAMIFKVDFEKAYDSVSWSFLDYMLLRLGFCQKWRRWISACLHSATISVLINGSPSKEFNPSRGLRQGDPLAPLLFNIIGEGLTGMMREAVHKNLYRSYLVGKKREPVNILQYADDTVFVGEVDWQNVHAIKALLRGFELASGLKINFAKSQFGIIGGGVNWGLAAANILNCSQMNYPFHYLGIPIGANPSSLMVWEPLITKFKAKLSKWAQKDISMGGKVTLINSVLNALPIYLLSFFRIPQRIVQKLISLQRKFLWGGDNTHNKIPWVKWADICLPKNEGGLGIKDISKFNVALMGRWIWAFASGQQQLWVRVLISKYGGWPEFQHDTDKRGFSHWWRDLRKIFHQSDHNIFKHQLTWKVGCGETIKFWTDKWLGEDYTLEQKYNQLFLISRQQNSLISNMGEFNHDSWEWNLRWRRNLFDHESDL

SEQ ID NO: 2337 - protein, 1252 aa, synthetic construct
  source 1..1252: note = Description of Artificial Sequence: Synthetic polypeptide
MDRSLKILQHNLNGLRARLTELIKFLSTARYDVLCFQETKLYPGVKDTILPGYRLSRLDRPGAHSKCFGGGLAIYVRTELSYQTLVLHSTEFEVNGVSLSLADGSKIAIVNVYLPPGKNVIEPSSYRNLCEQISHRNVLFCGDFNSKHNAWGSYKQDERGEGLLQFIEDNDMCILNDGRPTLIHNSSGVMSHLDLTIATSNIASNCEWQVSSTETLGSDHLLIDITYRGQIKREGTVGKPKWRIAKADWIKFTENCSQWDVKDIQDADVDVYANNVTMVLMEAAKDAIPRTSGKNRACPKPWWSDACQNAVKLRKKALRRVQRNLNTETKRTYLEATENARKVISEARTSHWHDFCQTLNQHTQIRDVWAKIKSMNGTKSTREIPVVTYGDRVGESDRQKADLMAESFADASSDKHHSPEFMNRKTNFAVDHSNVLTHIDENDPLNLPFTSDELQKALSSKKDSAAGEDEVKYSMLKKLPPEASKILLDFFNESWTNGHVPTKWKTASIIPILKAGKDPNKTESYRPVSLTSTLCKILETMVTHRLRYYLESNNLLDKNQSGFRKLRSTADHIVRLQHAMSKTLNSSGFLCAVFVDLTKAFDLVWTDGLMHKLRQLGIGGRMHNWIASFLADRKIRVTIGKSLSEEFSLENGTPQGSVISPTLFSVMVNDIRNPKYLSNKCQIAMFADDSTFWGNGTLYTNLQMRIQTCLDRFAKWANDWGFRISKAKTVGMLVCKDPQLTDMRLVLDGERIQFVSETKLLGVTFDRKLSWEPHIKNITNRCQIVLNLMRNISGNEWGANVVTLMMIYRALIRPILDYGSQAFMTARPMLLHKLDVIQHKALRLATGAGIGIKTESLLQDVGEVPLQIRREELALRYWSKLKHLGESSPTYLETARFRHAKKTISFGQSVRDSVRKYGLDRLPIKPLVFSQVAPWTVSPPIVDTSLASRLDKKRDDPCIARMIALTHMDARWSESIRIYTDGSHNPDDGTTGLGIYVPSSSTRISKRLPNNCSVYTSEMLAILYAVKYSAGHYHSNYVVLSDSLSSLTSILNDSSNSQAELVDEIRQACSLVHSQGKSIELAWIPSHVGIQGNEIADELARIGLGLSEIDRIDYSLSEIRSMITKSIKSTWEATLIDANAFRFRLNDSISSKVFLHHPNRQICRTVARLRMMGEVRNHKYELKLCPCGEAGTAEHLLIHCEQLRELRKSLVEIMKRYRLEYTLKNILSHTGEGMSTICETVYNFLSESRMIT

SEQ ID NO: 2338 - protein, 1164 aa, synthetic construct
  source 1..1164: note = Description of Artificial Sequence: Synthetic polypeptide
MTYPREGCTGPRDGLSKQEELTAGYSGFSNAWTLTRIIMSHRAWTVELFLLNCTIGPIDPSTSLCTTFLSKATTSRCHYWSVPLLVLMLMKSLDAVFPGPQETALFLVRFGSSDDASRVLKNRKLLPSSVEATADHTAYQRDLYRKLKLKASLHNTSHPDSLKKVVYVKGTPTLVDLRRTSTAPLSEKPSKNLQASETFKKLAGILKPVNKLSLYYQNAYSMYGKLHLFKAKLFQLSILPDIVVITETWLQDCVLSSELGMQQFDVFRCDRDLSSHGVQRGGGVLIGVKKFLQAELVHVDNVIEQLIIRISLPSHKLIVAASYLRPDSSVQVFSSHVSNLEDANIKFPDHRMVLLGDFNLHHITWSSDTSAYSPMAYLSPALRSAADIISGYSTSMDLVQHFKHHPKKGYSLDLLFAQKDFISPMDFNEDILPCDDHHVPGMFSCNISVASSASCNLKFCKRKFYSADFEAIRARLSEEDWATVLYSFSDDPDSGIARFYEILNGVIDQHVPITKQSLSSYPKWYDSELINAICKKKIAHSTWKSSNSKRDEIEFKRLRAVCVRLSRSKYRAYISSVELGLKRNMRTFWSFIKNLRNDSSIPSKMYHGPTRAASDVEVSNLFSGYFSSVYRTDSLREFESNDEPLVSLSNIVLSIETLRSIVANLDDNINGGPDGIPPYFIKRCWSLLERPIVHIFESMLRSGYFPTFWKYSFVVPIYKNGDRHSVANYRPISTLSCIPKILDAYLASELSNSLLSKVAQQQHGFISGRSTLTNLLVFNDFLSESLCNHEQTDAVYTDMSKAFDSVNHSRLISKLFNFGIRGKLLDLLRSYLTNRSQAVRVNGAVSSPVDVPSGVLQGSHLGPLLFCLYVNDLVPKLSAAQVLLYADDIKLFMRVRSADDSVKLQRDLDTLVAWSVENGLSLNANKCSVISFSRSKSLLLFNYCINGSRLQRVDVVKDLGVIFDSSLTFITANQQTDVVVSRSLRMLGFIKRSTVDFSDPSAIIYLYKTLVLPHFLYCPQIWRPHSQYLINKLESVRHSFLRYIAFKMGKPLHRFCHDYSEIAEGCDILTVDSTFYLHDCVMTFKILRGLTNCERLSDLFVSRTVAYPLRNLRDLREGTFSSNLGFYSSINRMKRQWNSIPNNVQSKESVGQFKSSIRSLSLAY

SEQ ID NO: 2339 - protein, 866 aa, synthetic construct
  source 1..866: note = Description of Artificial Sequence: Synthetic polypeptide
MESLFIEIINEKSKNTLIGVIYRPPHSNVNDFLNEMELLTTKLNTENKKCYILRDFNLNLINIEYHELTRQFLDIMYSSSMIPTISKPTRITSHSATLIDNIFTNNINMQDSFSGLLCADISDHIPIFHITKIGKTKQNKEKRNMYTYKRIMNDSCIDNFLGEIDQINWDNVVLKENVNDSYNSFLQNITYIYETCFPLKKFRNKKINSKPWITNGLLKSIHKKHKLYKKSQELPSESNFNKFKQYRNKLNSLLRIAKRDHFTDSLEKSKMDAKNTWKILNSLLKKNIKKPNYPDIFKNNNQEISNPKDIADKFADYFTNIGPNLSKNIENTNIDIKSYLKGNYSNSLLFRLTTPDEIKEITLSLKNKNSCGFDEINIRVIKAAISILSNPLSTLINQSIMAGIVPDKLKIAKVIPLFKSGEKELFSNYRPISILPCFSKIYERAIYNQLISFINKYNILNNNQYGFRDKHSTVMAVCDFIEKISSSIDKGYNTIGIFLDLSKAFDTINHNILLQKLQFYGIRGIPLLWFQNYLSNRKQFVNYKDTKSEEYDITCGVPQGSILGPLLFLIYINDVPNATELFSFTLFADDTNLIFKSKSAEDMDEILNSELFKLTEWFKTNKLSLNTKKTNYIIFRNSKRKTKHTTKIEINNEPIQMVNETKFLGLIIDSQLNWKSHINHVRTKITKNVGIMNKLRFYLPKFSLKTLYFTLVHPYIHYGNINWASNYDTSLKRIFLLQKRCVRIITNSHYLSHTEPLFKEERLLTVYDINTLETALFMYKFDNNQLPGTFDNFFKRNNTIHSYNMRNSCDYRTTLRKTRRGQFSISYRGPKIWSNLTCQAKQCRSLNMFKKIVKDNILSQKAAIDL

SEQ ID NO: 2340 - protein, 292 aa, synthetic construct
  source 1..292: note = Description of Artificial Sequence: Synthetic polypeptide
MRKYNVSFHCYADDIQIYLPLKSGGAEGLDRLQNCLADIKSWMELNFLCLNKNKTEMFVFGKSDLLTGCCSAVGPLDPSDAPFIRNLGVNLDRHFKFDKQVSLVVQSSFYHLRLISKVKPYLPPHALQQVIHALIFSRLDYCNSLYSGMDQSLLRRLQLVQNSAARLLTGTRRCEHITPILRSLHWLPVSFRISFKILLLVFKCLNGLAPQYLSELLHVYRPCRVLRSEDQMLLVVPRTRLVTRGDRAFSVAGPKLWNALPYSVRSARTVSNFKTLLKTHLFTQAFNSSERI

SEQ ID NO: 2341 - protein, 455 aa, synthetic construct
  source 1..455: note = Description of Artificial Sequence: Synthetic polypeptide
MKLNQHKAAGPDGVSPRTLRTCAHQLSAVLQHLFNLSLRLERVPLLWKTSCLVPVPKKTSPSHPGDFRPVALTSHVMKVLERLVLAQVRPVVSSSLDPLQFAYRPRLGVDDAVIHLLQRTHSHLDGGGGMVRITFFDFSSAFNTIRPSLLGDKLRLMGAGASTVSWITDYLTDRPQFVRLGGVLSDVVLSGVGAPQGTVLSPFLFTLYTSDFQHNSESCHLQKFSDDSVVVGCISGGREEEYRRLVDGFVEWAGENHLLLNVDKTREMVIDFRRKRTVLQPLCILGRDVEAVEEYKYLGVTIDSRLSWRSHSTAVYKKACSRLYFLRKLRSFNVCSKMLGIFYQSVVASTLFSSVVCWGSSIAVSDTNRLNKLIRKAGSVIGCKQETFEAVMERRSLNKLLSIMDNPEHPLHPVLDKQRSSFSRRLRQLRSKTARYQKSFIPNTITLFNNSQCRR

SEQ ID NO: 2342 - protein, 965 aa, synthetic construct
  source 1..965: note = Description of Artificial Sequence: Synthetic polypeptide
MTPSAESKRIMTLRLFTESGYINIISAYAPTLTTNSADKNHFYESLQKVVDSISSDEQLFILGDFNARVGIDTSSWPICLGHHGIGKMNENGQRLLEFCSINELCITNTFFPGKECHKVSWHHPRSGHWHQLDFVLVQRKDLNCVKSTRTYHSADCDTDHSLIVSKTKLKAKKFHRTTLNKKPKINCMNTRNSAKCEDFAKAFAKKWEENAHVESVEETWQTLCSAIYEAAREAFGEKKSSNKDWLEENADRLMPLIKQKNEAYLEYIKNPSDSAKAKLQHAKGLLQREIKHCINQYWIDICSNIQVASDTGNARAMYEGLRKALGPNITKIAPLKTKEGISITDKSKQMARWIEHYSELYSEERNIMSETRDFIPTMELMQELDAVPSKQELIDAIDALSSGKAPGTDCIPAEVLKHNKDCLIPPLYDLLLKCWTKGEIPQDMKDANIVTLYKNKGDKGDCNNYRGISLLSITGKAFAKVILRRLQLLANSIYPESQCGFCTGRSTIDMIFSLCQLQEKCREQNMPLYISFVDLTKTFDTVSRQGLYLLLERIGCPPKLLQLIIAFHEGMRATIQFDGYTLDSFQVNTGVKQGCVLAPTLFGIFFSVLLSCAFKNSHGSIYLHTRSDGSLFNLARLRAKSKIKKVLIRELLFAADAAIVAHNETQLQDLMAQLSRTCQQFALTISIKKTVVLAQGNTTSPCIMLNNNPLEVVLKFCYLGSTITSNLSLDAEINIHIGKAATTFSRLTKHAWANSKLTIRTKILIYQACVLSILLYGSETWTTYASQEKQLSSFHLHCLHKILNIKWQDKVPNEKVLERAGMSSMGAILHNRRLRWLGHMKRMDNNCIPKNILYGELAEGTRPKGRPKLCFKDYCKATLVKFQIDIDSWENLAVDRNTWHQHLRQGQKHYDKTLAENQNKKRMKRKEQMITTNTTTAWSCIYCSRTCLSHIGLLSHTKHCKKRPV

SEQ ID NO: 2343 - protein, 1216 aa, synthetic construct
  source 1..1216: note = Description of Artificial Sequence: Synthetic polypeptide
MDVDGGPAMPEPWVLRFDGACRRNPGPGGAGAALFKPCGTVAWTCSHYMPNSSETNNTAEYTALLLGVQSAVHHGASHLEIEGDSHLVVAQVKGTFACRNPRLRQLRNRVRHALRAVTSLTLKHIDRKANAHADRLANRALDLKRSLAECGEHQGAMESCLHMNPAAQRQREQPAPPARPACAPTRAEPASDHDEDIDAEIAARDGGEAFPTLPIGPGTAPARQPRLRLRQLTEDEQEAAASALQAMAEELACKIEDADSWTSGDGYISAIPGRIRQVLQPFTAAQPHPRPTLQQQRQRPPRVTRTQREHRLDEALDEMAAVQQERPTSRSAVRRARRRVGRIRASMRQQQLRHDFARNESKCVEDILRAASAETAAEEHPETCPIDSGTLHEHFTAVNSPRINFLPDEACGALFREAMADVGTPQERRSALTDELTVDEVEDQLMQAATNSSPGHDGVGYDIYKKFAAQLVPLLHAAFQFCWRHHRVPALWKVGFVRLIHKKGDPTDPANWRPICLQTAIYKLYSGLLARRLSTYLEANGLLPMAQKGFRAYNGCHEHNFVATTLLDQTRRMRRRLYQVWYDLRNAFGSVHQDMLWYVLRLLGVERAFVERCDDIYEDSYFVVGNAADGATEPVRQEVGVYQGCPLSPLLFIAALVPLLRALEKLDGVGVALADGVRPCTTAYADDLKVFSDSAAGIARCHAVVEQFLEWTGLQANPGKCAFLAVTRNARGNPAHDKDMKLSLHDEEVSSIKLHDSYRYLGVGDGFDHVRHRLQLEPKLQQIKREAVALMQSGLATWQVVKALKTYVYPKVEYALRHLRPLQSQLQSFDRVVAKGLRHLLRLPRSATNEVLYAPTSSGGLGLQPLVEMHRALQIAHAWQMLHSKDPAIREVARAQVCQVARKRHRLREEHWRGRDDELVRCFLNSELAASPHAEALRRHGDIGSLWSDVQRWLRIYHLSLVVQDDRNGLDPLGLRVPHHAKWLDHKSVLRHVKLHLKIRHQTRWKGLADQGKTVRAHGGVGAKFVSTGAGLSDDDYRFGVKARLNQIDTNAVLKRKRLRSHKTCRDPTCSSAETLAHVLNHCEPNMDAIRQRHDDALEQIGSKIRNALKRGESTAELRLNQTVPEYTGAALRPDIVLRNVAAKKMVIADLAVTFEEHAAGARHSSLQLSHDHKTLKYQPIVAELQLKGWQVQTAAIVYGSLGSVQPSNSTPTRRS

SEQ ID NO: 2344 - protein, 1677 aa, synthetic construct
  source 1..1677: note = Description of Artificial Sequence: Synthetic polypeptide
MDVDQGRVRPRQRRPSPRRPSERRPDGKRRRLNSEDDADAQKPAEHLQLADEDGAENHTPVHTPSAASAHQAPVLAVYVHNAERFTCTLCTFTAASFSSLQRHRTTRHRRAVLQDKFLAGCACGTPIASRPAAAKHAQACAGRSTALPATAPPVAGTSSPTDAAATATVAAATVTPDSPQPATPELAAPPPLASPTHPEVVEVQEQPSQGRWGPALPRALVAERVAARLGAIPAPRWEPPLPRELVSTRIAARLGEVPAPRWGPPLPRRMVASRIAARLLPPEPTADGETKEDTPADGADLTARDANQENNPAAAPDRTATAAAMDMDSGADGEWLLRFDGACRANPGPGGAGAALFKPDGSVVWTCSHYMPSSSETNNTAEYSALLLGSRAAADHGATSLRVEGDSTLVIQQVRGIFAARNAILRRLRDQVKVELARVGSFSLHHIDRQANAHADRLANRALDLRRTMMECGAHTAGDGCTNTTLDPMPVLPPQPTPRAPPPTPAADTNIEMQEPEDEDLADIDDGEVYAAMRIGPDAVPQRRPRLRLRQLTEAEDDAAREMVERLGATLAAKITDASDWESAEGYITALPHLLYDKLQPYSQAQRRPEPRPQRQRQQHQGSQCPRQQRQQGEQRRQRPLHDQGQDRRSLEGDAHGDNERDGDASQQDSARRRQCRRRGRSGAAKRRRRRRPPRVTRHHREHRLDEALDDLHAVEQASPGDRTAVRRARRRVGRVNSAIDQQHLRHRFDTDEKACVEDILAKARAQQETPRTAASSAGTASDPAAPAAGATDDGTCPIPGDELWRYFDGVNTPSQEFAPDAPAGAAFRSAMTHLPAASRFRELLTEAPTQDDIESQLQHAHGTSSPGLDGVGYDVYQHFAAQLLPVLATAFQKCWEAKRVPQSWKLGVVRLLHKKGAREDPANWRPICLQQAIYKLYAGVLARRLVRWLDANDRHAPGQKGFRAVNGCGEHNFLAATLVDQARRKRRQLYEVWYDFRNAFGSVPFALLWDALARLGVPEDYVTMCKGLYESAAFVVGNAADGTTAPISLRVGVFQGCPLSPQLFNAAISPLLFALKRLPATGVPLSGDDCPGASAYADDLKIFSGTEDGIKRQHALVADFLRWTGMAANPSKCSAMSIQRDRRGVLKADDLKLELDGSPIPALSMSASYTYLGVGDGFDHTRRRVELAPTLKQLKDDATALLQSGLAPWQVVKAVKTYLYPRVEYALRHLRPFQQQLAGFDRHLARGLRHLLRLPASATAQCFYAPVSRGGLGLLPLTELHAALQVAHGWQMLNSKDPAIQRIARVQLRQIADARHRLDTQAWAGREEELCELLLNSQLGTSPDAPPKRRNGDIGSLWVDVQRHLRTLGLQFATAPACADTGTAAATLQLRVPHHDKWLDHRTVLRHVKLHIKHRHWTKWAAMRDQGRTARAHGGVGSSFLTRPRGMCEADYRFAVAARLNQLDTHSVLKRRRLRAHDRCRQPGCSRVETLAHVLNHCPGTMDAVRGRHDDALKTIERALIASSSGDRQDRVELRVNQTVPSLAGPALRPDLQLYNHTKKTVAVVDLAVAFEEQVGEDPDSSALARIAAHKRAKYDRIKRHLERQGWKVHLSALVYGSLGAVAGGNRSVYTEHLGLLKRDAKRLDWQKKEEDREDKCSSWPHEGWVKAPGDRTAIG

SEQ ID NO: 2345 - protein, 771 aa, synthetic construct
  source 1..771: note = Description of Artificial Sequence: Synthetic polypeptide
MKKNKTPGSDGITAEFYQVFWNEICDILVAALNECYANEKMSDTQRKGIITLIYKKGDHRELKNWRPITLLNSDYKIIATVLAKRFQKVIGKIIHENQSGYIRGRLAACNVRLTKDIIEYMTRNGKNGALMMVDFSKAFDVIDVTFIKKCLSKFNFGPVFQKWVTILYTNISSSVIVNGWLSETFSVLRGIRQGCPLSALLFVMAAELMANKVRENKEIKGLDIDDKGIDLKLLQYADDTLFYVSDINSFENILIELEVFGIVAGPKLNREKTVLIWIGTACQRWSLSCFGLHWTDEPVKYLGHHIAPDLQCALKIDWENKLEKMQKLLDNWRKRNLTLFGRLTIIKSLAISQVIHLMIVDTIPSTFLIKLNSLIFKFLWKSKIEKVKTFRLKWLGMFLDNTTGNWKDMCKHWFDCLGGLHLLLNCNYTDYTLNLLKLRNVPHFYIEILHAWYLINKYTSAECQTQKHVDENILWYNQDIVFEKKMLFYEDWYKSGIIYLNDIFKNGTFVSVNELFIRLKTRRSKQFLIFDYTKLQKSIPKIWINDKHRVPLVFKDHNFSIPHFVFGKSVKPVSLLSSKQWYNMISFEQIKINKCCLYWEDVLQKDVKWSSVFNRNLIGIKDFRLREFNFKLLYNMLPVRNNLFKWGLSYDDLCLKCKKTEDVLHAFISCKANETFFAYLKDLVLRAFNLRIEIDIVLLLKMNSQTEIDLIMTIAFWSIYKMIIFRNKYGYDNRDLSLIYLFKREMTNRIEINEHLKVQNMKFPANLLSYI

SEQ ID NO: 2346 - protein, 1017 aa, synthetic construct
  source 1..1017: note = Description of Artificial Sequence: Synthetic polypeptide
MESHNSKSKRNGVKGTSRNRGASLGRPSHVRQVGPDRHSASVRNRNIMRIGTWNVRTLYQKGKLDNVVQEMNRMRINILGISETRWTGSGEFTVEKHRMIYSGGIRHERGVGVLLDPFTANCVLGFWAVSDRVLLVKLQGKPFNMAIIVVYAPTAESTDEDIDIFMNSQITMTAKSQCKSNEIVIAMGDMNAKVGRGRYGGTVGPYGIGDRNERGNRWVEWCEAKGMVIVNTWFKEHPRRIYTWKSPGDRARNQIDYITINERFKRGVKQAKTYPGADCRSDHIPVVATLQCKLKKMTKAKSIQKVDFEQLQNRDVRLRYTVKVQNRFDSLTDQGEEVTWESMRDILVETAEETLPKKEKKSKQRWMTEEILSKMSKRQKIKDRDGIEYRELDREIHDHCTKAKEEWLNKQCAEIERSFNANDPRVFKKVNDLSGKKLRSSKLGCIKAKDGSVLVEKEEILNRWTEYIGELFDDVRKEPPHCAGSIEGPRILLSEVRSAISMMKRNKAAGPDGVVMEMVEALENYGVMKLTEVINKIYDDGKFPDDLCKSIFITLPKKPGAVECGQHRIISLMSHITKIILRVLLQRARNHLTPEISNVQFGFVKDAGTRNAVFVLRSIAERAVEMQKDVFLCFIDYTKAFDKVRHDQLFEDLTKIGLDTKDVKLLQNLYWEQTACVRVETELSDYINIKEGGSARMCHVSRSLQLLQVTTSTLKRGVRQGCVMSPDLFNYYSELILRNLEQERGLKVGGHNITNIRYADDTILIAESEKDLQRLLDVVVRESDKRGLSLNYKKTECMVISKKGGIPCSLKINNNQIKQATSVNYLGTTITDDARGEQEIKRRIALAKSTFSKLENILKNKKLKMKTRLRVLNCYVYPVLMYGCEAWTLTSDLRKRLESCEVWFLRRMLRISWTERVSNDEVFAMAGTRRKLLNNIRGRQLSFLGHVIRKNGLENLALTGRIEGRRSRGRRRILWMSSLRSGISECGIDLGENELLHRIWDRELWHSMVANVSGYGT

SEQ ID NO: 2347 - protein, 725 aa, synthetic construct
  source 1..725: note = Description of Artificial Sequence: Synthetic polypeptide
MSGETRYIYDKADYDAMYDKIMEIDWNNEFWEMSMEKSWSFFKTTLLDIFNRYTPKKTLNVSQRKKHWMNRETLEVVREKHRHFRKWQEMKSEKNREKYSSAEIEQQRRCYSRSSNQARWQCRKAVSSYEKYIASGVKKNARAFWSYVNSKITTRESVCNLTKPDGSKTETDQEKAEVLQDFFSSVFTQEDLQDIPLPLDVEFDTPLDDIQITSGDVFELLRRLKPNKSPGPDKIHPRLLKELADVLALPISLLFQKSLESKQLPQDWKSANVTPIFKKGNKSDSKNYRPVSLTSIICKMMENLVRKQLLDHLMTNDLISVHQHGFVVGRSCITNLLEVLDQWTQILDDGGTVDAIYLDFMKAFDTVPHHRLLLKLESYGVRGNVLAWLESFLSGRQQRVVVRGKQSKWGKVLSGVPQGSVLGPCLFLLFVNDLPKVVNSNISMFADDTKLYVRADTADLRKQLQEDLSRMEEWAEKWQLCFHPDKCTVLRLGKLPAEASTDYCMKKGTDSVTLSVTKVEKDLGVLVDSQLSFKDHISQTVLKANRVLGVIRRTFMYLNTDTMPFLFKGLVRPILEYGQAAWSPYRLGEQRMLESVQRRATKIIPGLRNLTYQERLTKLKLPTLVHRRKRGDMIDVYKYVNGLYTVQEMPFKMSTEDRTRGHSRKLEKKYSRLDIRKYFFSNRVVELWNGLPENVVAAGSVNSFKNRLDSHWSKSVPVSLLYEPV

SEQ ID NO: 2348 - protein, 476 aa, synthetic construct
  source 1..476: note = Description of Artificial Sequence: Synthetic polypeptide
MIISKPITRLFNLSLRLGVVPQEWKQARVTPIHKGGDKDNVNNYRPISILPTIMKVLEKAVHSQLHDHLLEFDLLNAQQSGFRKGYSTNTLLTYVSDNLHRNIDSGKLTGIVFLDIRKAFDSVDHSKLLEKLYTYGVRGNTLSWFESYLRGRYQCTLVQRARSDLQVLQSGVPQGSILGPLLFTLFMNDLPNSVEHSKVMLYADDTAIMFSALNPKEIESTMNSDLDRVKSWLCHNKLSLNTDKTNFLLVGTPQKLRHIEAPIDIKIDGLQIRQVEHVKYLGVWLDQHLNWNEHMKHTSSKIASRLALLRRVRKYLTIDSAKLLANALVLPYFDYCCTSWSNCNQGLRDTLIKLHKQMARIVLQMNVLTPSSEMFSKLKWMNMEKRWQFQKCKLMFDIVNGYSPSYLQDMFTQSAATHRYSTRIADTRGLVIPKVKTENGRRAFSFEGAMTWNNLPSELRNAQTKQSFCTSYFRNM

SEQ ID NO: 2349 - protein, 998 aa, synthetic construct
  source 1..998: note = Description of Artificial Sequence: Synthetic polypeptide
MPGSTVNSIINDQSFVEFLSPRNGENDFYGPSHGSYTCNEFNDLVNDSNDGLFSILHINCRSLSKNYDNISTFLSSLTVQFTAIALTEIWIKEYNSYYDIHNYTLVLKGRQNKKGGGIGFYVRNDVKFNRRLDLDINTPYIESLFIEVVTANISAILGVVYRPPDQPIQSFLESVENVITTVNTENRIFYMIGDYNINLFKVNCQSHVKDFIEMFMAVGMYPLVHGPTRVVNNSISLIDNIFTNNLENCSSGTILTDISDHFPIFCIYSQSTQTVTETCITMKRQFSAKNINTFITNIGNTHWILKENDANSSYDCFLKQFQHVYEICFPMKCQSKKKKRFDKPWFNDELRQLNRKKSLYYKKYLNNRTAYRLDAYKKCRNKLTNRIKYVKYKYFKQSFVDAKGDTKQTWKIINGLLGTKSKKNEIPSTLQYNNETIDNDTDICESFNEYFINIGPKLTSTLDIPTGDFKQYLKKMNLLLFFYFFFTPVTPREIINIVDKLKSNKCSGFDSVDVKMVKRVIHLICYPLCAIFNSSLETGIVPDQLKIAQIIPIFKSGTKTEMSNYRPISLLPVFSKILERAVYNRLYSFLNLHNILNNSQFGFRTGHSTSSASVDFTCQVSQVFDKSEVMMGLFLDLSKAFDTLDHNIILAKLFNYGIRGVLLNWFKSYLSNRKQFVKIKGNTSSMQTVVCGVPQGSILGPLLFILSINDMCNISDKLKYILFADDTSVFMSHKNIQSLQQDFGNEINKLLHWLSLNKLILNVNKTNYMVFTKQQKIDFNEVDLQVNNHEFKRVSVNKFLGIEIDSKLTWNEHTGAVCNKISKNTGILNKLRFLPKCVLRMLYNTLILPHLYYCSEVWAMTSQTNLNRILKMQKKAIRIISNSHYRAHSKPIFYKLKLLNVFDICEYHIAVFMYLCRNESLPCALLKYFNLNSTFHDYETRNASNFHLPQIKTTLMKKSISFDGPKIWNSIPINIRNCRSLQTFKRKYKMYLIESYVL

SEQ ID NO: 2350 - protein, 873 aa, synthetic construct
  source 1..873: note = Description of Artificial Sequence: Synthetic polypeptide
MFISNLLTYKIRSDLSLKSDGTDSICIEINMAQRKNILICTIYRPPHTNVELFLDEFDRMLHKVNLENKDVYLMGDFNIDLLQEDNTFHNMLRSNSFNAMIDKPTRLANNSSTLIDNIFTNVTNNYIGSGLLYSEISDHLPIFLICNHVRNYPEDEKNQAMIRKITAEKIAMFNDELLKVTWNDVVACTDTNKAYALFWNLFSSLLNKHIPMTKKRSARNRIKQPWITKGIFCSIKKRNRLYKYSLRHPGEESLNNYKSYRNKLTTIIRQSRQMYFAKQFENANGNASSTWNVINQALKKQKSKSKCHITKDNNTMVDSKEIANCFNAYFVGVGPNQANTIASNGVDFSQFLQTPCNKSLFLKPTNLIEILNIARSLKISYANGHDGISTYLLKQVIGNIITPLVHIFNLSLTTGTFPEAFKIAKVVPIYKKDDSSQVSNYRPVSILSSLSKVLERLIYNRLYCFLTENDLLNQDQYGFRKYHSTDLALAQLYDKVSNALASRKHVIGVFMDLSKAFDTLDHKVLSSKLHYYGVRGVALDWFNDYLSGRKQYVSYESVDSSLLPMKCGVPQGSILGPLLFLLYVNDISNSTTSLQYIIFADDTNVFCSNSDFRSLQRILNTELPKLSLWFRSNKLSLNLKKTNYIHFQSRKNATDKPIPEIVLDGEYLEKKQNTKFLGTIINENLKWSDHVHYVSKRVSRTVGLLYKLKHYVPLNILYMLYNSLILPYMSYCNILWADSKVYTDKMLLLQKKAIRVCTNAGYRDHTDPLFARLKTLKVTDINFLQKALFMFRLHNDSLPSHFPPMFCLNRNIHTYPTRQSNKYHLCNPKTTMAMKSIRHSGPDIWNSLSVDIRNLKSVYTFKKSVKSILLSKY

SEQ ID NO: 2351 - protein, 1198 aa, synthetic construct
  source 1..1198: note = Description of Artificial Sequence: Synthetic polypeptide
MKNYFLPPSSSRSHPLLLAILSIVCALKLLKSGNLYTQIADHRSASLPFFDLHATLCEPRSLHQPTRRRTYTADIDNCKLLLFISSCNKWNRNTKLCPLDFRSTSLSHLTILLLLSGQVETNPGPSTSAPETFPCAICGDEVRDNDPALLCDHCDCWCHISCVGISPDSYDILTKKSRSFAWVCCQCSSTNIGSSSSLQGLNLSQTNRFSPLHHDSSNEEILPSINPLTSTPTSSPGGRRQPRFHPPSRNRKKAFKVMVVNCNGLKGNAKKSSFHAAIAHHTPDFVFGCESKLDDSLSSYSIFPSNYSIYRKDRNIHGGGVFIAIIDTLIVTECPEFDSDCEIQWCNVQLANAKPLYIGSYYCPPNNRQQGLEGLHQSLSKIMTRHRRSHPNILIAGDFNHPDINWDDQSTTNPATSTCHQKLLDILLHNSLSQTVREVTRPSSNNILDLVVTSNPALVENVCVKSGISDHNIVTFTLAANPKISVKPLRKIYQFHKADEQQLRDAAAEFATEFLQSDPERRSVETNWSIIVNFLNRCLSELIPSKMSKGRKHLPWITPPLKRQMRKRDSLFKKAHSQSCSTAWTAYRQFRNQVAKNVHRARCEYVNNIIGASLKDNPKSFWSYIKTCRSENIGIPTLRTPSKLCASALDKAETLNDYFQSVFTPHQLQPLVQKGPSPFPTIGHLHVHRTGVEKRLQQLDPSKASGPDELPPKLLKLVAREIASPLSFLFQQSYNSGIVPAQWKQALVTPIHKSGEKCDPSNYRPISLTCVCCKVMEHIILSHVSKHVAVNNILTDAQHGFRRGLSTTTQLTTAVHDWSSILQQRSQADIIFLDFKKAFDRVPHLLLSTKLQYYGISGDSLQWIMSLLTDRQQAVVVDGSKSTWRDVTSGVPQGSVIGPTLFLLYINDIQDNIQSTMRLFADDSTLYREIRCPEDHQILKDDLQQLSRWSSNWMMDFNVKKCAILTITRKRTPSIREYHLSNGLIPRVKEYKYLGVTVAADLRWNKHCQTIRHKASRTLGLLRRTLSPCTRDVKSRAYTALVRPQLEYASEAWNPHSVTVTKMLEQVQRTAARFVYRDYRYTTSPSALVAALGWDTLHTRRILDQCTLLYKIHHRLVSIPAPTIVIPATYFGRHDHNLKYVIPVATIDSFKFSYYPRAIRIWNHLPGSAVNATGITNFKEAALPSIRMMQPPVGSHII

SEQ ID NO: 2352 - protein, 671 aa, synthetic construct
  source 1..671: note = Description of Artificial Sequence: Synthetic polypeptide
MHGHTLDLVITRCADNILHNCMVLDKGISDHYVISCDLNLQKSDAKRTLITSRNYRLINQESFGNELVAVLQSISQCGDVNEQVEFINKAICDVLDRHCPVSVRMKRDRPCGPWYDDNIHLLKRKKRKSERKWRKSNLRADRDIFVCHKDELNAAIVKSKSSYFTNLLLEANCKTMYATLHLLLGSSKKVLPYCDDQTDLANKFAGFFDDKISKIRTVLDEREQGLQTSGIVQSMDKHQCETGFSTFVDVSPSDIKMIISKSANKFCSLDPMPTWLVKDNIEVLVSPFVSLINSSLRSGVFPDKFKDAIISPCLKKSTLDSLVLANYRPVSNLAFLSKVLETIVSKQLVKHLDRCDLHEVLQSAYKANHSTESALLRVKHDLLLAIDKREGVIMVMLDLKSAFDTIDHSVLLRRLHSDFFLSGTVLDWFQSYLEGRSFAVSIGNHLSHKLSLKYGVPQGSVLGPLLFTMYLRPLGDILRNNGVEFHLYADDVQLYYSFNPKSSSSFQNAILLIEKCVSEVNVWMIKNKLLMNEQKTESLLIISSRLRHYLPDHVHLLLGDAFVEPSESVRTLGVVLDSSLTMSQQVTSLCKSLNFHLYNISRVRRMLTDEACHHAIRSLVLSRLDNANSLLININVSDIDRLQRIQNRAARIISNARKYDHVSPFLNNYTG

SEQ ID NO: 2353 - protein, 1015 aa, synthetic construct
  source 1..1015: note = Description of Artificial Sequence: Synthetic polypeptide
MAPAQLCGSATSVEYTISAGQIYSFPVPSVATSAAKICHLNHTDIEPCTTNPDSKDEGESDDSLCLGSPKFSSSPRTLKKKPINPTKPKAKVLTILNVNCQSIRAKKQSFAILIHQHNPDVVIETESWLTEDIRSSEVFPTDHYNIARRDRPNDLHGGVFLAIRKDLLASREIELETDCELIWCKISMPGAKTFHVAMKLRAHLVQDQHARSQDFPCCDEMSLTELERSLSRLSPTHSVVIGGDFNLPGWDWRNQQVGNCRYPNLHRRLGSLLDDHGLTQVVTEPTRYQNTLDLLLVSNPTVVNEVTVVPGVSDHDCPLVKLNVRPTRPDEEESFTLQQSSVGEVWDQPGQMRRKVLLYSKAQWEKFGESIEAVRDEIEAKVTYASVNELWLIFKTGIEKGINDFIPQKLTPHKANLPWVTNGIRRLIKKRDRLSNECRHLRKREGLIPYVLEERLRDLKRTLQFALRKAYWNYVESIFTVEDDDEGPGKYNCMKRFWQFIKNNRNDSAGIAELKSDGVLFSEPAEKADALNRQFKKVFTQEIPIPPHLLPDTSEHESMPDIVITLKGIEMMLKKLKPHKAPGPDGITPRILKQLSRVIAPILRIIYRLSYDTGEIPDDWHKANVVPVYKKGDRTDPSNYRPISLTCICCKMMEHIFASSIMRHGDEKDILCPLQHGFQAKKSCELQLTRLCHLGFVTDLLNNMELSQQTDVLITDFSKAFDKVGHQRLLKKMEYYGVRGKSIDWISSFLPNRKQQVVLDGHTSPTVEVQSGVPQGSVLGPCLFLFYINDLPNQLSTKVRLFADDTVLYHTIQETHEDAELLQQDLDQLCGWSSKWMMALNPKKCQVITVSRKKSQVCPSVFPQWRNHWSLCQLPNTLALLSLLTSTGTQHVSATCKKANNTLAFLRRNLRVNSTQLKTTAYQALVRPLLEYGSAVWDPHTIRCVNQLEMVQRRAARYVLNRYHHTSSVSDMLSQLGWTSLQKRREHQRLTLLYKMHYSLVDFDIHHPTSNRQQS

SEQ ID NO: 2354 - protein, 811 aa, synthetic construct
  source 1..811: note = Description of Artificial Sequence: Synthetic polypeptide
MDFNLNLLQCDENTSCQDFLDLMLSKSFAPTITKPTRITEYSATLIDNIFVSGTPIVKSGVIVTDISDHFPIYTVISNVISHSNPNTNKCSGIRYLSDPDLRRLKEALTITDWYAVYNCDDVDTSFDNFMEILMLTLNSFPTRQQNCSNYKKHPRLAWISKSLLKSINRKNTLYYKYKKNHTVKSKLKYSRYRNILTTSLRLAKKNYFTKQFNVNKGDIKNTWRVINNVLKSRRVSTHISNIMINENRIQDPLVIAEEFNNYFANIGPNLAQNIPVSDLHFQYFLETKNTNSMFCTPILEHEVIDIVKNMKTKKSAGNDGITNFILKEIIGEIVSPLTHLLNLSIMNGIVPKKMKIAKVIPIFKKGNAQDIGNYRPISLLTSFSKILEKLMYSRTMQFLIDFDILSDTQFGFRQKHSTTHALLMFLDKVAHAIDDMAHTVGIFLDFSKAFDTINHDILLYKLSHYGIRGKALEWFRNYLTDRKQYVSINGHDSYQRSVSCGVPQGSLLGPLLFVIYINDFRNSSEIMSFILFADDTNIFYSHRDPQYLLRTVNSELKRIQAWINANKLSLNVSKTHFMLFSNCIKSLPGNILIDNTNLNQAESTKFLGIYIDSDLSWKIHVNYLCKLISRNTGILNKLKHEFPTHILLSLYNTLILPYLNYGILAWGNGTKAQLEKLLIIQKRAIRNINHAGFLSHTSQLFFNNKVLRIGDVYVYSVGVFMYQLTINELPAVICALFVRNNTIHSYSTRQRNLFHLPLTRTLFAQKNITFTGPKLWNDLPIEFTESTSLYSFKRKLKCHLLSNYALMVEEA

SEQ ID NO: 2355 - protein, 977 aa, synthetic construct
  source 1..977: note = Description of Artificial Sequence: Synthetic polypeptide
MPPYVLIGSLLLFFTFQANCLRFNVPNLRATEWQPHNAAIKDRLTLLHHDLGAGIVTPKSAADDLTSILTEYFSGQDDFVDKKLSDTYIEHEPKSLIQARKCKNVLRKRAFGKNGTAEDRKAFRAAVKTVSYLRKQDKQKKCDKSRSHMEKRYRNNFYEFSKAACSGSLNESPTKPLFSEDVANNYFGDKYSTPNVINIGSLNWFPYVNINTPDRFEFDMTPIKPKDVKNVLRRKKAMSAPGNDGLMYGMIKHLDSVHHFLATLYNKILDSGDPPESWSESKVTLIYKSGDTDKPENFRMISLTSCISKVFHQIIAERSMSYLTENNFIDKTVQKAFIDGVNGCIEHNIVLHEILSDAKCKKRSLHTTFFDLADAFGSVSHQLITSSMERYAIPTPVARYVATLYSRLNGRVRGPGWITKPFEFKRGVFQGDPLSPTIFLMCFNPVLEYLKEQQDQFGYKWGDRKIITTPYADDFNLITGNKLQHQKLMNGINDRLKSMGLTLKPRKCSSLSLTSGKPNIVDFTIGSDVISSVHGHPVKFLGSLITFSMKTSEIFEYLKGKIESTLENINKCNIRNEYKLCILTRYALPSLRYMLTVHDVHASHLKSLDIILDRYIKMWLGIPSRGANLAVVHDPDGLNIPSISDLYRTCHCLAYSRSRVKGDDVVNHALDRRLERERGWSRQTSFSLEAHEIHSKIPDSVSWNQTKTVIKKAVQDVCRENWKRVIEPLLVQGEFMKVVHMENTDVTWKSIIYNLPQSVMKFSVNAAIDSLPTNKNLYRWGKRISDKCNLCNCTGTLHHVLNNCERMLDRYTWRHNNILRIMLKHIKNTSNNSTKVYADIEGESINGGTIPPNIIRTQHKPDICHIDNKNKDIIIIELTVPFETNIDKAHQRKQDKYASLTHDITSTGWKSKLICIEIGSRGLITPQNKYRLKEILKITNSTRYPESRDEILKAVLFSSYVIFQGRREPAWQFDQYL

SEQ ID NO: 2356 - protein, 715 aa, synthetic construct
  source 1..715: note = Description of Artificial Sequence: Synthetic polypeptide
MHRKQTKHNIESLNFDLAKEDWVEVLCVSDVNVAYEKFLEIVLHYYHKNIPLVKIKKGKKAKQPWITKGILRSIVARNKLYKEALTSQCNDKLKKYKTYRNHLTSLIRLSKKLYYSNNIESNKSNNNLLWKTVKELLGKKKTESNKCFLIDEQQITDPIKISKAFNEYYIDVGPNLAANIDSGDMDYNKSLNFPRENSLFLTPTNDYEIINVVQHLNSTKSSGHDSISVHLLKQIIFNMVTPLTYIFNLSISTGVFPHLLKIAKVIPIYKKDDSSVISNYRPISLLPSISKILEKIIYKRLNTFLQKNNSLIPNQFGFRIGHSTDYAILHMYDKIIEAFANSEHIVGVFMDLSKAFDTIDHKILIHKLQYYGVRGQALSWFTNYLQDRQQYVSFQNHESTKLTIKCGVPQGSILGPLLFIIYINDIIETSSLLNFIIFADDTSISYSHKNFDTLITRLNCELMKISRWFKSNKLSLNLSKTNFIHFKQTNVHDMRNCNIEIDGLPLIEKQSVKFLGVSIDSHLNFNEHIRNIHTSISRNIGILYKLKQILSERSMIILYNSLILSHVIYCNIVWGNCSLTRINSLFLLQKRAIRMITNSHYISHTEPLFQRLKTLKIQDIHIFQTCIFMYKYSHNQLPSLFHNIYSLNSNIHTYPTRCSTNYHLENPKILLAQKSVRHHGPDVWNSLPNSIRHCSSLYSFKASLKKTLISKYLHN

SEQ ID NO: 2357 - protein, 430 aa, synthetic construct
  source 1..430: note = Description of Artificial Sequence: Synthetic polypeptide
MPAKPCRESIRIILQRRIMKKTEEVLSEAQAGFRPGRSTMDQLFTLRQIMEKRLERNQSLLCCFIDYEKAFDSVWQEGLWKAMNFFGYSSKYIHLLQALYQQSSSAVRVNGELTDWFKTTVGVRQGCALSPQLFNILLEAVMLYAIHDTKIGVRVQGQLINNLRFADDIVLIADNDRDLQTIVDLVHQSSSNFGLKINITKTEVQAISKQPQLLNINVGGEQLKQVDKFTYLGGTISQTGSCSEEVKHRIGKAIGAFQALKKIWASQDIRCSTKVELYKVLVLSILLYGAETWTLKKVDENRLHTFEMACLRRIMGVTRFDRLRNTHIRTQLNMEETIIDRVATKRLRYFGHINRMNSKRYPHILLNGNIHGKRPRGRPAKRWTDCIKADCKNRQVDSLTKATRLTEDRKVWQAIVKQKPSYIPVMVWTA

SEQ ID NO: 2358 - protein, 964 aa, synthetic construct
  source 1..964: note = Description of Artificial Sequence: Synthetic polypeptide
MAPVRMAAVAQCPPQLCFFLMFVVLFFSFFATCNALISYDRQTLLDIRQNSQSGPSQTEFFMNRGDLPWLPWQKKHRRKRGKRAGILVRLRNRQHRAPLPSILLANVQSLENKLDELRARITFHRDIKNCNIFVFTETWLVPSIPDSAIVPEGLSIHRRDRTIDSGKCRGGGVCVLTNKRWCTDVQTVSSGCSPDLEYLMIRCRPFYLPREFTAIFCTAVYIPPHADTTRALDELFDAIDRQETLHPEAAFIVAGDFNKANMKKVLPKFYQHVNFPTRGENILDHVYTPYAHAYKARPRPAFGKSDHSSVLLLPAYRQKLKREQPMMRSVQRWTDQSDSTLRHCFNITDWEVFRTAADNNINNYAEYVMDFIHKCINDVVPRVNVRTYPNQKPWVNGEVRAALRARTAAFKSGDPSEYKSSRYALRKAIKTAKGQYREKVESCYSNSNIRNMWSGLKTITDYKGKSCRVGEVTASLPDELNTFYARFDKHLSQELLLEEDGRPYQISQADVCKHFRKVNTRKAPGPDNIPGRVFKACAHELADVFTDIFNLSLLQSAVPTCFKRTTIIPVPKKMNVSCLNDYRPVALTSIAMKCFERIVKAHITSLLPASLDPLQFAYRSNRSTDDAIAIALHTALSHLDQRNTYVRMLFIDYSSAFNTIVPSRLVMKLRDLNIGSSLCSWILDFLTNRPQVVRIGNITSSTLTLSTGAPQGCVLSPLLYTLFTHDCTATHSSNTIIKFADDTTIIGCISDGDESAYRAEVRALTSWCRDNNLLLNVSKTKELIVDYRRLQGGGHTPIHIEGAEVERVSCFRFLGINISEDLSWSHHVGVITKAARQRLFFLRRLRRFGMDSRILTNFYRCTIESILSGCITTWYGSCNALDRKALQRVVRSAERITRTELPAMQDLYRQRCRRKMQRILSDPSHPSHRLFTLLPSGRRYRSIQTRTSRYRDSFYPQAIRLLNC

SEQ ID NO: 2359 - protein, 1783 aa, synthetic construct
  source 1..1783: note = Description of Artificial Sequence: Synthetic polypeptide
MLGVSAAQGNGGPASSRRKRWRKKKRLEREDEPTLEIVAPPPPVQMLPASDATACVIDWSVQMSIAEDNLKTAAVITVVCSRDISANEIVSVLAPRLEMEEGGLVLRQLSQSSFLAVLPSRVQLDTLVDSFPIIREENFMLSSRRWTRFGGAGGNSLKHLVELELRGLPVHAWETSVVQQLINPHACISQVLPDTLEVRSLEAFRCLAWCSDPERIPATKDLWITEPDQASAAEGKKALVYPVQIRWVPADLSLLTGDPPLLIGGDDQDKSDTPPSRRRCSDNPPRTQHDAINDVPGNKTHTQRRPVHDRLGPLRRSDSPRELSHPRVQIDFEARSSQPCVLSDAVADSCVGNPPTPVPDGVQCLAAGDVLLRSEEGCEDAEVIPMTPMAVSSPCPSSGGRRRLLLKTATKQAKFRNPPIAFFRRRRRAPRTPEGATLPPCSSGDRGAGSSLGALPPAPAAGVAASLLPHGSPPLVESHGSPGQQDFLRRVSKAVGAVLPLPKAVGGGRRRRQPTSLPDAIRRSRRVAGLGVEQVQHIPKARRTIMKSILAEPDSEHFSQQNLDAYAKLFQAPLSRAQVEALAALFGWVMPDDEGEVVPPGTATLVCLQPTVAYYSNCCPMDPSLILFWNVRGLNSAARQDVVRSLVDSLRVDVVCLQETKLVNCDRRTVLSMLGADFDNNFICLPSVGASGGVLITWRAKLGRIVASRVDSFSVSVKFNPADGVAWWLTCVYGPQGHDRKIAFINELRAIRAACTGPWLLGGDFNLIFRDEDKNNININRPMMGRFRRCINDLSIKDIDLLGRKYTWSGANNVQVKLDRVFCSSDWEEKFPNYLLQSSASEDSDHCPLLLGLKDNHTGKRRFHFESFWPRFDGFLEAVSNTWGSVQQSSCPLKTLSLKFKATTKGLQSWSDRKVGNFKLQLELAREILLQLEVAKESRILNVLETWLFGRLKKCSLSLASLIRSMARTRSRIAWLKDGDANTRLFHSWSRYRKRKNFIAKIQDGEQLVTSHSDKAEVLRSFYSDLIGTGQQRSRTVNLDTLEMQHTDLQGLEQPISEEEVWNTIKQLPPDKAPGPDGFTGRFYKVCWSIIKKDIMAAIMAIWNKDFRNFRYLNTAFITLLPKKEDAILAKDFRPISLIHSFAKLITKIMASRLSGYMDKLVSRNQSAFIKGRFIQDNFMLVQQTARLLHAQKQPRILLKLDISKAFDSVSWSFLLEVLEKVGFGPIWRDVISGLLMTSSTQILLNGVPGEFIQHLRGLRQGDSLSPLLFIIVMDVLNGLIVKAADEGLLQPLSTRSIQHRISLYADDVVIFLRPAASDLHLVTRILELFGDASGLKTNVQKSSVAPIHCSPVDMEMVTQIFPCKVETLPLKYLGLPLSLRKLSKEQLQPLIDRLADLLPNWKADLMTRAGRAIQVQHVLTATVIYHAMALDLPKWAIKAIDKIRRGFLWKGRKDVLGGHCLVAWGKVTRPKELGGLGISDLQKLNWALRVRWLWLEKTDPSKSWADLPLQSSSILKSILSTALITEIGDGRNTLFWRDRWLMGLRIEDLTPHIFAIVPTRITNRRTVAEGIVEMAWIRDLRGTITWDVLSDFLTLSEVIADYSINVGVPDKHIWKFSPTGQYSSKSAYDMLFLGSTSLGAYERIWESWAPSKCSFFLWLVMHNRCWTADRLARRGLPHPSVCPLCDQEEETIQHLLISCVFARQFWYSLLSRSGLPNLSPDNASCSLDDWWSRAVEKIPRDLQSGFNSLVILGAWSLWRHRNDCVFNGEIAKPGECSHPRWR

SEQ ID NO: 2360 - protein, 481 aa, synthetic construct
  source 1..481: note = Description of Artificial Sequence: Synthetic polypeptide
MNLSKILIWNVRGLNRKARRDAVRMMVESTRPDIVCLQETKKESISRFMVFSLLGNVFDQFTFLPAIGTRGGILLAWKGSVCSALQTRVDEFSISVQFNQNDSLPWWFTGVYGPQSDEKKLQFLQELRMVRSVCVGPWAVGGDFNLIYRAEDKNNNNLDRAMMGRFQRIINDLQLVELPLLGRKFTWSNERSSPTLVRLDRFFYSRDWEDLFPDCLMQSSSSSISDHCPLVVGLHEFTQGKRRFHFESFWTKLEGFMTEVENSWCQPIAVGCPLQRMADKLKRLSKHLQSWSQKRVGHVKRQLVMTNEILHRLEVARDSRDLSYHEEWLRRKLKHHSLGLASLERTMARHRSGLNWLKEGDANTAYFHHHSRYRKRKNFIGKLKVEDRIVVDQQEKKHAVWNFYNNLLGVAASREFTLNLGVFHRPASNLEVLDQIFSEEEVWNTIKSIPSDKAPGPDGFTGRFYKMCLDGCQRGFLGSCQ

SEQ ID NO: 2361 - protein, 711 aa, synthetic construct
  source 1..711: note = Description of Artificial Sequence: Synthetic polypeptide
MADVMAVMNSLHDQRFLNFDLLNRANIVLLPKHDGAENLSSFRPISLIHSVAKLFMKLLSMRLAPTMRDIISKCQTAFIKGRSIHDNFLFVRNMARRYHRNGTPMLLVKLDISKAFDSVRWDYLLALLAHLGFPPKWRDWVASLLATCSSQVLLNGIPGQSITHGRGLRQGDPLSPFLFVLAIDPLQRLLHLATEAGILSRVAKARTRLRIAMYADDAIIFVKPEKRELDSFATLLHQFGEATGLRTNIQKSSVVPIKCAGLNLDEILAGFPASRSQFPIKYLGIPLSVERLKKVDFQYLLDKVSSKLTCWQGRNFTFAGRLVLVKSVLSAQPVHTLTTINVPKVVLEKIDKFRKRFLWAGNENLTGGKCKVNWPTVARPLDLGGLGVLDIHRFARALRLRWLWREWEVPEAPWAGLQTPCNDTDKLLFAAATRIAIGDGAKTSFWHCAWVNGRRPKDIAPDIFAASSDCRLSVREALTDSTWVNRIDLHAIHTADHLKQFVELWSFAHSVSLVQNTEDRIDWIYNASGEYSAASAYRIQFMGHTCSNLKALIWKPWGPSKCKLFAWLIIRNRVWTSDRLAARGWPHSPSCPLCKRHPETAHHIIAGCRYSRRIWDALASWLSIGPLAPATWPDSTSIKQWWFMVGSVAVPKKGTRSLLLLVVWHIWLERNNRTFQRQERSVADLLAAIKAEARLWGVAGAKHLLALLPML

SEQ ID NO: 2362 - protein, 1188 aa, synthetic construct
  source 1..1188: note = Description of Artificial Sequence: Synthetic polypeptide
MDPSKIICWNVRGLNSADRQNSVRNLVLSSKADVVCLQETKMTVISTRTILAALGSDFCQFSFLPSCGASGGVLVAWKRHLGVTGLSRIDRYSISIQFCNAHNRCAWWLTCVYGPQSNSDKMLFLQELRDVRAACTGPWLIAGDFNLIYKASDKNNSNINRAMMGRFRKLVEDLSLNEVPLFGRKYTWSNQQDSPVLVKLDRVLCSVEWEDNFPNVLLQSAASEGSDHCPLLLGIRDNKLGKRRFCFEAFWPKLEGFQDVIQEVWDSVAAVNCPFMTLNLKLKATARKLQSWSGKHVGHVRTQLALAKEILHRLEIAQDCRALSLAEIWLSNLLKKHSLFLSSLQRTIARSRSRISWLKEGDANTKLFHMHSRHRKRRNFVAQLVNGDQILTNHDDKAVLVDNFYARLIGECGDREQTINLEALHLPTFNLAHLDEPVTELELWNTIKGLPNDKAPGPDGFTGRFYKSCWNIIKMDLMAVVAAVWNRKFDNFCLLNSAFITLIPKHDGAVHVKDFRPISLVHSAAKLITKLLANRLSQKLNDMVSPIQSAFIKGRFIQDNFMLVQQTARLFHQQKRPRLLLKLDITKAFDSVSWPFLIEVMKYLGFGQIWRDIICGLLSSSSTQVLLNGIPGGHIEYRRGLRQGDPLSPMLFILVMDVLGLLFSKAEHAGLLLDLSPRRPLHRVSMYADDVALFLHPSAADIAITLDILHLFGEASGLRNNEQKSNVYPIQCGGVELEMVQDLLPCGISTFPCKYLGLPLSLKNLTKVQVQPIVDRIADQLPGWKADLMTRAGRKVQVQHVLTGMLIYLAMAVNIPSWAIKAIDKIRRSFLWRGRKEARGGHCLVAWGRVCRPLQLGGLGISSLKELIWALRMRWLWLQKTEPNRPWCSLPIKVPDKARAFFSMVLTSKVGNGANTLFWTDKWIHGQKIADLVPRLFDIIPKKITNRRTVQEALTDRRWIADITGSLSVGVLLDYLHLWNLISDFELLPDIEDKHTFSIAANGTYSAKAAYDGLFIGAVQFGHYERVWKTWAPSKCHFFLWLSVLNKCWTADRLAKRGLDHPERCPLCDQESESLDHILVSCVFAREFWFRLMCIFRLQNLAPTPSTVSFTGWWEMIDNGSGDMIMKGVNSLIALGAWIIWNHRNRIVFDGISPSVSAALCQAREEQQLWEMAGAKGLSFLAATIRGT

SEQ ID NO: 2363 - protein, 1189 aa, synthetic construct
  source 1..1189: note = Description of Artificial Sequence: Synthetic polypeptide
MNLSNILVWNARGLNNKARRDYVRDTILSSKADIICLQETKVASFSSHLLLSVCGSDFDKFLTLPAVGTRGGILIAWKGAVCQVISSRIDNFSVSVQFAGMDGMNWWFTGVYGPQEDDRKIQFLQELLDFRTLCSGPWLLSGDFNMIYQAADKNNANLNRALMGRFRRFLDDCLLKEIPLHGRKFTWSNERSSPTLVRLDRVFCCNDWEDFFPNSLLQSASSGVSDHCPLILSLNVQTHKKRRFHFESYWPKLPGFLEAVSHSWNAPVSTACPVEGIFLKLQRLSKGLQKWSHHKVGNVKLQLATAKEILHRLEIARDNRVLSPGEEWLRKKLKLHCLGLASLERTIARLRSRILYLQEGDANTSFFHQQARYRKKKNFIAKFQVEERIVTSQEEKQQAALDFYDNLLGTAEHRDYTLDLHSLGIQQHDLGDLELVFSMEEVWSVVKDLPLDKAPGPDGFTGRFYKVCWDIIKEDMMGALLAVQCGHVSKLKLLNTAFITLLPKKVDALLVKDYRPISLVHSFAKLVTKVLAARLAPHLPSMVSINQSAFIKGRSIQDNFLLVQQLTRSLHHSKEPHILLKLDISKAFDSISWPFLLDMLQHLGFGRSWCNLISLLLCTSSTRILVNGEPGEYILHHRGLRQGDPLSPMLFILVMEALNAMVSYAFREHMLQPIANQHAKHCISFYADDVVLFMRPSHQDISAIISILDIFGHATGLKTNISKSSVTPIQCGANELTTISALLPCATKNFPCTYLGIPLSIRRLANSDLLPLVDKVADKLPGWKANLLSRAGRLVMVKTVLSSVPIYLMLALELPKWVFKAIDKRRRGFLWKGQGDANGGNCLVSWEAVQRPLKYGGLGILNLEMFGWALRARWLWLQKTDASRPWAGLPIRVHRNAKALVDVAITSVVGSGESVKFWSDRWLLGKTVAEHCPTLIQVISRRALKRRTVAEGLTNRQWVSDIRGGLSVTVLVEYLQLWNLVDGVVLQPDIADQHIWRLSAHGTYCSKSAYDALFVGSIPFGPWRRVWKTWAPLRCKFFVWLAIKNRVWTADRLAKRGLPHPVACPLCDQAEETIQHILVSCVFARQIWTSMLHNLGLLAIVPQHGCTRFSNWWCQSIKKVEKSLRKGLNSLIILVAWEIWKHRNACVFEGVVPCTQRVQSAVIEEGNVWCLAGASALQDLLLRQLPRGP

SEQ ID NO: 2364 - protein, 997 aa, synthetic construct
  source 1..997: note = Description of Artificial Sequence: Synthetic polypeptide
MPSDKLWLLVGDFNLIRRPEDRNKAGGDINLMLKFNEAISNLDLVEIPLHGLSYTWSNRQREPLLQRLDWFFISQEWSIVYPDTCAKTMPRDISDHVPCLVSFKSKIPKPKIFRFENFWLEFEGFMNIFQTTWLGLPCLPDKAKNLTAKFKIVRKVLKDWQRSLPKIDKTVRDIKLLIEFIDNIEEHRDLSIEEWNFRDIMQQKVAELLNIQKIYWKQRASIKWITEGDICSRFFHAHATVKHRRNTIASLTDENGIIHFEHDHKSNLLWEAFKSRLGSSDFLGIDFDLSELLIRNEDLQGLDSPFTKQEIDNIIKSLPSDKSPGPDGFNTNFIKKCWHIIAQDFYDLCEKFYQEEVCLRSINGSFIVLIPKKENPQKVGDYRPISLLNNNMKILTKLLANRLQSFMTRLVHRNQYGFIKGRTIQDCLAWAYEYIHLCHSSKKEIIVLKLDFEKAFDTLEHELIMQVMTHKGFGSKWINWVRNILHSGTSSVLLNGVPGKSFHCKRGVRQGDPLSPLLFVLAADLLQSIINKARHLNLLQLPLPDICEQDFPIVQYADDTLLIMEACPKQLFFLKAILNSFASSTGLRVNYNKSNMYPINVNPEKMEILSRTLNCQIGAMSFTYLGLPLGLAKPRIQQFLPLIQRIEKRLSCSSNFLSQAGRLELVNSVFSALPTFFMCTLKIPKSIIKQIDIYRKHCLWRGNDTSSKKPPLVAWSTVTQRKVNGGLGVLRLETQNDALLLKFFHKFFNSYDLPWVNIIWNKYYTPNRLPGHRRIGSFWWKSMLKLLHNFKGLAHPIIGNGRSILFWEDQWNKSIPRQQYPELFSFTKSTKLSIAEVKEQDHLFRIFQLPISEQAYEQYLELQVVWEQIVLSNVKDRWRYIWDSDSYSTQKAYRHLMGQTQVHSIYKCLWKSKCQPKHKVFYWLWLKNRLNTRNMLRRKNMTLESYSCENCLWQREETLYHLFLRCNFAKACWNSIGIPPTQNCSSRGGLGKPQTTT

SEQ ID NO: 2365 - protein, 733 aa, synthetic construct
  source 1..733: note = Description of Artificial Sequence: Synthetic polypeptide
MVVFSMFFQMDPSKIVCWNVRGLNGSARQDVVRCLVDSVKADVVCLQETKMSVFSRLFVFRLLGSEFQNFVFTPSVGASGGILVAWKNNISSCGSRIDDHCVSVNFSLETGSSWWLSCVYAPQGNHEKIQFLQDLRLIRTHCSGPWLVVGDFNMILCDEDKSNSNVDRAMMGRFRRWKDDLALLELPLIGRRFTWSNGHACPTLVRLDRMFCTADWEDLFPDCLLQSAATQDSDHCPLLLGLCDINKRKGRFHFQAFWVKLEDFQDVVANAWSSIPAGQCPLVSLSKKLQATAKALQRWSDNKVGDLKLQLEMARELLHRLEMAHDSRTLSPSEDWLRRTLKKHILVLSSLSRSIARLRSRINWLKEGDAHTSLFHAQARIRKKKNFIGSLSTSEGLILTSHEDKADELFHFYDALLGTALGRENSLNLDALEMPSFNLNELDVPFSEEEVWGTVKSMPSDKAPGPDGFTGRFYKVCWVTIKADVMAAISCVWARKFRNMGLLNSAFITLLPKVEGATQVKDFRPISLVHSFAKLVTKMMANRLARHLNDMVSPNQTAFIKKRFILDNFMLVQHTARFLHRQRQARILFKLDISKAFDSVSWAFLLEVLQKLGFGQIWRDIICGLLASSSTRILLNGVPGDYIAHQRGLRQGDPLSPMLFILVMDTLNLLIQRASDEGLLHSLSTNSLQHRFSLYADDAVVFLKPAAFRHKSDSGNPSDFWGCVRSKDQRSEE

SEQ ID NO: 2366 - protein, 979 aa, synthetic construct
  source 1..979: note = Description of Artificial Sequence: Synthetic polypeptide
MCLSIPVLSPLHRPYKRSTPRGRCHSNLVVPARTTHVEFQVSGSLWNCRSAANKAEFISAYATLQSLDFLALTETWITTDNTATPTALSSSAYVFSHTPRASSQRGGGTGILISPKWTFSLSPLTHLSISSFEFHAVTVTSPFKLNILIIYRPPGSLGEFINELDALISSFPEDGSPLTVLGDFNLPTSTFDSFLSASFFPLLSSFDLTLSPSPPTHKAGNTLDLIFTRCCSSTNLIATPLQVSDHYLVSFSLSLSSNTSHSAPTRMVLRRPNLRSLSPATLSSSILSSLPSAQTFSNLSPDSASSTLLSSLSASFDFLCPLSSRPARSSPPAPWLDDSLRAHRTGLRAAERKWRKTRLPADLASFHSLLSTFSSSVSAAKATFYHSKLQASASNPRKLFATFSSLLNPPPPPPPSSLSADDFVNHFEKKVDDIRSSFAKSNDTAGPAHTALPCALTSFSPLSPDEISRLVTAGRPTTCPLDPIPSSLLQTISGDLLPYLTSLINSSLTAGYVPSVFKRARVAPLLKKPTLDPSDVNNYRPVSLLSFLSKTLERAVLGQLSCYLSQNDLLDPNQSGFKTGHSTETALLCVTEALRTAKANSLSSALILLDLSAAFDTVNHQILLSTLSELGISGAAHAWIASYLTGRSYQVAWRESVSAPRALTTGVPQGSVLGPLLFSLYTKSLGSVISSHGLSYHCYADDTQLIFSFPPSDNQVANRISACLADISVWMTDHHLKLNLGKTELLFLPGKDCPFHDLAITVDNSLVSSSQSAKSLGVTLDNTLSFSTNIKAVTRSCRFMLYNIRRVRPCLTQEAAQVLIQALVISRLDYCNSLLAGLPACAIKPLQLIQNAAARLVFNLPKFSHVTPLLRSLHWLPVEARIRYKTMVLAYGAVRGTAPPYLQALIRPYTQTRALRSSTSGLLASLPLRKHSSRSAQSKLFAALAPQWWNKLPHDARTAESITTFRRHLKPHLFKEYLG

SEQ ID NO: 2367 - protein, 1230 aa, synthetic construct
  source 1..1230: note = Description of Artificial Sequence: Synthetic polypeptide
MLAGVPTLVVFFQYAMAQSRKRKHTGSDVSRVNKVRVCELGRGSHSESLLQSPLATGGESSTNPSLATAIQIPRVGNGSPHQSPTSQSVSLETQPETTKAGKPRQRMKWTTDMNEFIMRTYYTITKLETDITGYRRELYDKFTSRYPNITVTEQRIADQRRTIIHRNLIPHSTLESIKTQVAQQISQHETDSHTQIEHDVEQTPEITYIDDNTQPINNTDTDLINKLTDTLQETLTKFTGTDPTQRPRIPKLHNSQQLNNTLHCMNTHILPKLINAETTLIEIHTLIYAAAVTVTTHLGLKTLPNKIGTNTKHHLKPAWQKRLEKQINEIRTELGRLTQYTKNNTSTKLMKSIRKIFRKLKTHTRHENHNTHIKEYIDTLKQKLAAKSQRLKRYKTSLARKLDNTLFTNNEKTFYRNINTKDPKQTQNREIPTQQSLTSFWSALWAVPVTHNQRASWIAEEETRTLDVPEMPYTTITTEELTNTIRYTHNWKAPGVDGIQNFWYKHFTCLHDLLAKHLTHLIHEPKDTPSFLTHGITFMKPKSTNTGNPSQYRPITCLPTLYKILTSCITNKIYAHIEENNILTEQQKGCRRSHMGCKEQLIIDTTILKQVHRQHRHLHAAYIDYKKAFDSIPHSWLIQTLQLYKINTKYITFLQNIMQHWRTTLHITINNNHVATEPIHIRRGIFQGDSLSPLWFCLALNPLSNKLNTSNCGYDIRQNQTTHYIHSHLFYMDDIKLYASTQTQLQQLLQITHTFSKDICMEFGLDKCKTLHIEKGVLKKGGFTLENGDTIESMEEGEVYKYLGFQQARLTEQKKTKQTLSKLYTNRLNNILKTHLNGKNTVKAINTFAIPILTYSFGVIQWTRTELESLQRKTRTTLTKYQYHHPKSAIERTTLPRKEGGRGLIDIPHLHDRQIYNLREFFHKKQHTSQLHKAIVLADRNITPLNLQNNTPCQIDNTAHIQEKKTSWCKKELHGRHPHDLQKHFIDAKASNSWLVRGDLFTETEGFIIAIQDQVINTKNYRKYILKDSTLTNDTCRKCHIAPETIQHITSGCKLLAQTDYLHRHNQVANIIHQKLATKHKLINTLTPYYKYIPDTILENSTHKMYYDRTILTDKTIHHNRPDITLIDKQNKVTYIIDISIPDTHNIQDAFTQKISKYTELSQEIKRLWGMQKVVTVPIILSSTGVIPHTLHKSLKTLDLHPKTYITLQKASLLNTCNIVRKFLSTDTDS

SEQ ID NO: 2368 - protein, 731 aa, synthetic construct
  source 1..731: note = Description of Artificial Sequence: Synthetic polypeptide
MEFLVDDLSILAPLGKSDHAVLSFSFVSKTELRYPTSNKRWNFKRLNVLALQDYLQQVDWDVHPQLEVDAHWDFLLHTILCATEHSVPKMVPKSYKQPPIIKNRTRRLLSRKRHCWAEYKRTDNNGAYRQYKHIRNICTKAIREDRLQFQTKLIDKFVSNPKSLFSYAASLRQGKTGVSQLLGPNGPTNNDSDAANLLAEQYSRTFQLTHINHTDESFTCTCTGLSEVDLSADLVLRKLQHLRKDTSPGPDMVHSAVLREAASILATPLSVMFAHSLSRGKLPEIWKLAHITPIFKGGRRSEPSSYRPVALLSIPSKIMESLVYDGILEYLSSSKFFSPQQHGFRKGHSCMTNLLTAVDRWTTILDRKGKVDVIYLDFSKAFDRVNHACLIKKLGRLGIKPPLIDWLSSYLENRHFKVRVNFTLSQAMECPSGVPQGSILGPLLFLIYINDLPQQVSSDLLLFADDVKLWREIRNHNDILVLQEDLTRLQSWADDNGLTFNTSKCKVVHLRHVADYSYNLGNSPLEVSQVEKDLGVLVPYDLKSYANCDKNASQANLALVTLKRIFGQFDGRTFHIIFNSFIRPHLEYGNIVFPPSLQKDKDTLERIQRRATKSVRGLKFKPYEERLKSLNLYPLEYRRLRGDLLMTYSILNTSGHPLKHLLKLSHNTNLRGNTQKLETLHSRTDCRHNFYSVRVVKCWNSLPTELVQATSQESFKRKLDLFLRTKDNILL

SEQ ID NO: 2369 - protein, 1449 aa, synthetic construct
  source 1..1449: note = Description of Artificial Sequence: Synthetic polypeptide
MQQKQNIPITCTSCGMFRFFTQKLDNYICSKCKQMTLMEQRIQQLEHRIKTLKDIQALELFLDTAQHAAVDQQPASHQHHQDHDQEPYGEINSKVDNPQAWKEVTHRRRRRTRQPPQNSSAQLHLHNRFEILTSLTYNQETHLVEDHSFLDTTQWTTLDQCAGDSPDGDSASPQSHLCNHANAPSPIIDQEQQEHPLGETRSNRNIPWESNGLSDVSQWIVIDECTGDVEEEDNTLHLHDSLQQEHSSGDIHTVLHKRDPVNPQRKQVLVVGDSLLRGTEAIISRPDGMARETCCLPGAKIHHITQRLSRLLKPHHPPHLMLIHVGTNDTARHTFQKITNDFRALGTKLKLYNVHVIFSSLLPVVGHGSTRAGKIVQVNNWLRKWCQEEHFGFLDHGLLFQEDGLLASDGVHLTQVGKHLFAHRLTNLIRRTLNPWSTLPRGWTTGKRWGASHTSRKTSFCTQTHKPHQAHFKLDPLGEGNNSLANTILPTTTGNRRKAKRRAAQTQQGPSTESTIIPNKQFEGRSQGLTCLYTNAQSMGNKQDELQLLAQHHTYDVIGITETWWDDSHHWNLTIEGYNLFHRNRTKGRGGGVALYVKNSYVAEEMQDCNPGNQLESIWIRIKGTGTQKDLVVGVYYRPPSQDEGLDEAFCQQLTKQAQRRDIVVMGDFNYPDICWKTNSAKSTKSNKFLTCLADNFMVQKVEEATRGSATLDLILTNVEDLINTVEVVGSLGASDHVLLQFAIQRNAETKTSQTRILDFKRADFQKMKELLSGIPWTPILKNKGVKDGWEFFKSEILKAQMQTVPTKKKNKTSAKKPEWMSKELLTELKLKSDMHKKWKRGEITKEEFKRIANTCREKVRKAKAQNELRLARDIKNNKKGFFAYVGRKRKKKEAIGPLQGEDGVMATGDREKAELLNAFFASVFSEKESHLQPQQHGMDEGLGEIQPQIGKQVVQEHLASLNEFKSPGPDQLHPRVLKELAEVISEPLAIIFESSWRTGEVPADWRRANVVPIFKKGKKNDPNNYRPVSLTSIPGKILEKIIKEVVCEHLETNAVIANSQHGFTKNKSCQTNLISFFDRVTSWVDTGNAVDVAYLDFSKAFDKVPHDLLANKLVKCGLDKTTVRWICNWLSERTQRVLTNASSSSWKEVTSGVPQGSVLGPVLFNIFINDLDEGLEGTIIKFADDTKLGGIANTPEDRSRIQNDLDRLERWAKTNKMKFNRDKCKILHFGRKNGNQRYRMGDAWLDSSVCEKDLGVLVDNKLNMSQQCDAAAKKANGILACINRGIASRSREVMLPLYSALVRPHLEYCVQFWAPQLKGDVDKLESVQRRATKMIKGLENKPYEERLKELGMFSLQKRRLRGDMIAMYKYVKGSHREEGASLFSAALQTRTRNNGFKLQERRFHLNIRKNFLTVRAVRQWNSLPGAVVEAPSLEAFKQRLDGHLSGVL

SEQ ID NO: 2370 - protein, 832 aa, synthetic construct
  source 1..832: note = Description of Artificial Sequence: Synthetic polypeptide
MDIVPKGLKVNNPLRSTYFTDYSERLCLTLSKKLRNHLISILYKKQKTIKNDISNLDRLISRQTSTPTDTLQDFCSTRQEIYYTHFYSLQQRKDNKFSNLLHTTGYNSNCLNPPDNIVNLSSYKLNPAEESVLSRGLSFCPTSPTNWIQFCGDLEAFFRRLRLREYFQTTTEHQSDLPDPPYQHQRKNNSIWTPPDGRNYNLDFYIHSFRNNAQTDIIRKRQQATHNLSRAEHHAIQSLKNNLDIVIKPADKGGAVVIMNKADYNQEATRQLSNTTFYKPLPSDPTLDYQKKLHCLLKSLPTATREQILTESPSDPRPGLFYLLPKIHKPGHPGRPIISGIGTLTTGLSSYVDTLLKPFVTNTPSYLRDTTDFLRKLQNIDNLPNNTILATMDVEALYTNIPHEDGLQAIRNTIPEDTTANLIADLCNFVLTHNYFRFENNLYLQISGTAMGTRMAPQYANIFMADLEQRFLNSRPLSPLLYLRYIDDIFMIWTHGQETLEIFHRDFNNLHPTINLSLDHSTREIHFLDTTVQINNGKLDTTLYRKPTDSYSYLHASSSHPEHTTRSIVYSQALRYNRICSNPTDRDQKLQDLYQAFINLNYPPRETKKQIERARRIPRNHLLQDRPKKTNNRTPLVITYNPQLKPVQHIINKLQPILEQDTILKEALGDRPIVSYRQPPNLKMILTNHHRTYHTNTNPGTFPCNKPRCQLCPHIHSADTIIGPNQVSYKIKNTYSCASRNIIYAIMCRKCPSAMYIGQTSQTLRQRINAHKTDIRQDHKEKTVSCHFNQKGHSLNDLATCILLQRPFTSALERESSELSFMLKFDTYQPGT

SEQ ID NO: 2371 - protein, 723 aa, synthetic construct
  source 1..723: note = Description of Artificial Sequence: Synthetic polypeptide
MTLGRSSMIDFVIVSSDLRPYVLDTRVKRGAELSTDHYLVVSWLRRWGTWSLSGPCSVPPLSRRPIGAVAARLSVPVAAATLEPAGGHLLVRDAVRLKKESYRAFLACGTPEAADGYRRAKRHAARAVAEAKTRAWEEFGEAMEKDFRTASRRFWSTIRRLRGGKRCSTNTVYSGDGVLLTSTRDVVGRWAEYFEDLLNPTNMPSTEEAEPGDSGLGSPISGDEVAEVVKKLLGGKAPGVDEIRPEFLKALDVVGLCWLTRLCNIAWTSGAVPLDWQTGVVVPLFKKGDRRVCSNYRGVTLLSLPGKVYSGVLERRVRRIVEPRIQEEQCGFRPGRGTLDQLYTLGRVLEGAWEFAQPVYMCFVDLEKAFDRVPRGALWGVLREYGVPGPLIRAVRSLYDRCQSLVRIAGSKSGSFPVRVGLRQGCPLSPILFITFMDRISRRSQGVEGIRFGGLRISSLLFADDVVLLASSDRDLQLSLERFAAECEAAGMGISASKSEAMVLSRKRVECLLRVRGGVLPQVEEFKYLGILFTNGGRREREIDRRIGAASAVKRALYRSVVVKRELSQKAKLSIYRSIYVPTLIYGHELWVMTERTRSRIQAAEMGFLRRVAGLSLRDRVRSSVIREGLRVEPLLLHIERSQLRWLGHLVRMPPGRLPGEVFRARPTGRRPRGRPRTRWRDYVSRLAWERLGIPPEELEEVAGEREVWASLLKLLPPRPDLG

SEQ ID NO: 2372 - protein, 908 aa, synthetic construct
  source 1..908: note = Description of Artificial Sequence: Synthetic polypeptide
MVMVNKKWNIKNSKKITFSRAEAVQIDIENEKEQIQILAVYRAPQGNIAEFIDDIDNWIKVENSKNLIITGDINIDITKQSNLVDKYLNCLAEHGLQSMIKDITREEILGLQLTRSCIDHICIRSKKYCKAHVIAEKLADHYFVGIAIPELGIPESERDQVTTYINNAKVDKYVREINWESIANEEDPEIIYNKIKNAFTDIYKKSSEQVTVKKRKTGNQWVTKEIDQLIRKKNKAWRLLKSSPESSQRKEEYRSIRNKVTSIIKKEKRNYFWKKFEDTKDPSQCWSVINQVLGRNTRLSIDQTIKKNFGTYCNDEKIANDFNNEFIQSIELLCNHGYQNETETRARIGNSMYLPEMTEEDLVEIVSNMKTNKAVGIDSIRPRDIKENVNIIKTVLLALYNKSLAIGKVPSGLKTAVVRPIYKKGDKKTLLNYRPVCILPVLNYIMEKYVHKALNGFINKYNLLTKTQYGFKTNSSTITLLEDFSDFVNKKLDEGNYVLALFIDFSRAFETVRHETLIDRLFSLGVRGKLLDWFKDYLSGRTQVVKIASSFSEKRLVKQGVPQGTVLGPILFNIYINDIVNVHLNSVLFQFADDTVILYADKDYTTAENKIQEDVYKLVKWYKENQIIINTKKTELMCFRSPQRRTQMEGNIKIHSDSCKNCNCEPLKLTTSVKYLGLYIDEHLKWNQHVEHICKRLRSVAAQLYHLRSCLPQPILKMIYHSLGKSVLVYGITIYGHCAKYLQDKINSILNKVVKNLYVDENRPLHYMYQHLDIQKLSDLLELNIIIQHQFSDKYKTKYIPIRNLRPKNLFQEPKVKTKYGKAVRASYVPRVFNKLPPRIIEITKISELKRELKQWFINRKELQLAEEKSTRGWNLNCVVLCVLFCRELWSKGVYMSCFHFFFLFARN

SEQ ID NO: 2373 - protein, 1108 aa, synthetic construct
  source 1..1108: note = Description of Artificial Sequence: Synthetic polypeptide
MTSPGQTPIGGARRLNLYPRGSSRNNEKPLRVATWNVRTLTAEERLPLLCRELDRYRLDLCGIQEVRWTGSGSCHHEGWTVLYSGQQTAKQQGVALLLNKRMKGAWERGGEVWEAVSPRLLWARLPINRRRGMVVVVTYAPTEDEHPWRDAGKADESDAFYDLLSQVLAKVAPRDRVIMLGDFNARVGHDAGTWSGVIGGHGPDQLNNNGRRLLDFCAAHGLVITNTLFRHRRIHTTSWMHAGSKQEHLLDYIVTDQRMRAHVLDTRTYRGADLPSDHRLVICKMRLPFFHSGGGCTPRTPFQPKVAWSQLSDESCKREFHHRLRLGLASSPTPPDVEGKWARFRTVTHAAAMAALGTRSRPPQRPWLTEEVFRMVEKKRQAHCHRLQNPTSENEEAYRSLRSEVRRAVRRCKDGWWSRVAEEMESASVARDHKSLFNSIKKVTCSATPITIIRGKNGDPISDPQEQVCRFAEHFCEVLGEGKSLSQENIVAQSEDDPAEAAVPQILEEVTPCEWLAEVPSVEEVLKAIRSLRPGKAAGRDDLPSEMLREGGVCAQTALYDIITTVWTTGRVPQDWKDALVVPLFKKGDRTDCNNYRGISLLSVPGKVLARIIQHRLARHAEERLAEPQCGFRKGRSCTDAIFSVRLLQQRCREFQQDLHLCFIDLVKAYDTISRPGLWVVLRAFGVPDPLLTIIKDLHDGERARVKLRGRESEPFPVHLGVRQGCPLAPTLFNIYFDHVVREAFNSCTGGISIWYRYNGRLIDARVRSRDGSLLLNHVMYADDLVIAAHSEEELETLLLRLERATKRWGLTISPTKTKHLPGYFVPSDTPPPQLPIGDGAVVERVESFPYLGSVLMTGSSLTAEVSLRISRAAISFHRLRNAVWKLPGLSLRTKLQVFSATVIPSLLYACETWTPLMEHLRRLETFRLACLRSILGLTRLDCVRSSQILERSGQGPIGELLRQARLRWLGHVARMPSHRMPKQLLFGRIEGAKRARHGLEKRWSDVVQEDVELSGLADDWYQRCQDRPLWRRLVKDATGQLEAVALQQQRRAEERRSQQRAERRVAKAQQVGTVGGTGGASASHLSQSTRGTWVCPVTSCQRAFDTS

SEQ ID NO: 2374 - protein, 840 aa, synthetic construct
  source 1..840: note = Description of Artificial Sequence: Synthetic polypeptide
MIAVLSKYIVRKVFYWRYRLIKSLPNLFNYLFINHAAAVPIFKRFMKVYNSLKRKELDISFLETCLEEKMIPSFIYKMKLSDCLSSKDVQLIHRRTLRRMLESEKIRRTSIDKKLTNIGLMLNNATNEFCLQVCVEWCIKNSIVQIKSKENAHIKKLINLRKIFGISKFSVENTVINLSKIVLNDDEERVLKFGPNHCIKNRLDETKLCAKIESLYFHIARSMKGINGNYVKSSLSASTMEYIDKNKKQNIRDFMTLKNLAKKNINICKFDKGNGIVILDHDVYVNKLNDLLNSPQFVKLPKGRKNGKLPPLKDEEFVQKMLNGFIEKKLIDEEVGKSIRPIGSQPAKLYGLPKIHKDGVPMRPVLSMVGTAQYKIAKFLDGLLKPLMRSEFECKDSFEFVSCIAKLQKRSMNDVMVSFDVCSLFTNVPLVETIDLCCALWNENDSEHHILDRRAFRKLLEFATSNVNFLFNDEWYQQIDGVAMGSPLAPTMASIFLASLEKKIASFQFEKPFVYKRYVDDIFLIFENQKHVEPFLQFMNSLHKNIVFTCETERKSSIAFLDLLIQRKDKQYETEIYRKPTDTGLYTSPESFCEFKYKRNMVKGLIYRSWALSSTFANSVKSVDKLVELLIKNGYSKSFLLLMIKETVDKLIKNPKDPCCGKSECNLSDGCELSVDLGDCKNGYKKIEPKYVLVLPYSEGFTNYKRKLGKLIGNLEYKIVSNSCKVRNMFINKSKTPVGLCSDLVYQFTCNGCNATYIGETSRHLCTRVLEHCRLKGLTNISEHNRGCKSDIGMSDFRILLRSFNSYWERVICEALLIRSLDPKINVQSAVTTNVLNVFK

SEQ ID NO: 2375 - protein, 284 aa, synthetic construct
  source 1..284: note = Description of Artificial Sequence: Synthetic polypeptide
MRKKLKELKEEIDSKTILVGDLNLPLSELDKSNQKINKKEVREVNEMLEKLELIDIWRKLNRDKKEYTFFSAVHGTYTKIDHVLGHRNIANKCRKAEIINATFSDHNVIKIIINKGPWKGKFKINWKLNNLILQNWWVKKEIIETIMDFIKENDNEETTYQNLWDTAKAVLRGKFISLSAYINKIEREEINELGLQLKKLEKEQIKNPQIKTKLEILKIKGEINKIESKRTIELINKTRSWYFEKTNKIDKVLVNLIKKRKKRIKLTVSKMKRVISPLMKRKLR

SEQ ID NO: 2376 - protein, 776 aa, synthetic construct
  source 1..776: note = Description of Artificial Sequence: Synthetic polypeptide
MNRLYGEGFHITLRSFNKLRDKKAQLIESLTFLKRCRDSGVIPIAFTLTSATVTSSNAKRILFKTSLALISEKIRLIRTELDQLDKTLYKSHLSLTAIMSTSDWEHVDNMTASSAATMSTKCKENLISKFNLLFNKRPDPHTKKLDVNKVVINRSNSSISDGLKSVLAKGLNFAVTPKHIPVNDIIAQVDVALRGLGHIAADVARSEIAATLKNAKMPASNLSKDERFELYKLKKRNDIVVLSADKGNATVIMDKIEYNNKIKELLDDGSYTKIKRDPTNSLVTQTNKIISDSTALIDQSKQFSLKPSAARPPRLYGLPKIHKVDTPLRPIVSTISSPTYKLARFLSEILRPFTGKTTSAVQNSTHLVSTIKGISLSPDDLLVSFDVVSLFTKVPVPDTIAIIEDLVHQGLNTEVPPLVRHCLTNTYFTWNGTFYKQTEGTPMGSPLSPVIANIFMEKFETDAIQTATLRPTLWKRYVDDTFVIWPHGRPALDQFFDHINSIHPAIRFTMEVEIDGKIPFLDVLIKKRPDGSMSHSVYRKATHTDAYLKPDSHHHPSQKNSLIKTLYHRAQCISDQEHISSELKHVHQALRANGYSDYTIRKAITQTMKKNPLEEPFKTITLPYIAGITKKISKILNKHKIQVRFNTLHKIRDLVPSVKDVIPDIQYPGVYKLSCLCGSSYIGETKRHISDRIREHKADLKHGRTNTSAVADHCSNSVGSHAIDFSKTEVLCKPSGFHERFVHEAIHIYKHRDNFNREDGFYLSNHWKDLINHFSS

SEQ ID NO: 2377 - protein, 788 aa, synthetic construct
  source 1..788: note = Description of Artificial Sequence: Synthetic polypeptide
MNHCSHESFKSKFNRLYGEGFHTSLRSFNRLRDKKAQLIESLTFLKRCRDSKVIPTAFTLTSAVATSLNAKRILARTSFALISEKIRLTRTELDQLDKTLYKSHLKLTATMSTSDWEHVDNMTTSSAATMSNKCRDNLISKFNHLSSKKSDPHTEKIDVNKVVINRSNSSISDGLKSVLAKGLNFAVTPRHLPVNDIIAHVDVALKGLSHISADVARSEIAATLKNAKLPPSNISKDERFELSQLKKRDDIVVLSADKGNATVIMDKTEYNNKIQELLNDGSYTKIKRDPTNSLVTKTNKIISDSTALIDENKQFSLKPSAARPPRLYGLPKIHKEDTPLRPIVSTISSPTYKLARFLADILRPFTGKTTSAVLNSTHLVSTIKDISLSPNDLLVSFDVVSLFTKVPVPDTIAIIEDLVHQGLHTDVPPLVRHCLTNTYFTWNGTFYKQTEGTPMGSPLSPVVANVFMEKFETDAIQTATLRPTLWKRYVDDTFVIWPHGQPALDQFRDHINSIHPAIRFTMEVEKDGKLPFLDVLIKRRHDGSMSHSVYRKATHTDAYLKPDSHHHPSQKNCLIKTLYHRAQCISDQEHITSELKHVHQALRANGYSDYTIRKAITPVMKKDPLVEPLKTITLPYIAGVTKKISKILNKHKIQVRFNTVHKIRDLVPSVKDALPDIQYPGVYKLKCLCGSSYIGETKRHISDRIREHKADLKHGKTNSSAVADHCYNSVGSHDIDFSKTEVLCKPTGYHERFVHEAIHIYKHRDNFNREDGFRLSNHWKDVLNHFCS

SEQ ID NO: 2378 - protein, 697 aa, synthetic construct
  source 1..697: note = Description of Artificial Sequence: Synthetic polypeptide
MELDTLDRTLLQAHLMLTQKMSPDWNHVDNMTASSAESLSVKCKANLISKFNHLSKKNPVPHITKLDVNKIVINQSSTPISDNLKTVLARGLNFAVTPKHIPVDDIISQVDVALKGVGHIQADVARAEIATILKNAKKPISNISKNERSELANLKNRSDIVILSADKGNATVIMDKDSYNNKIQNLLNDGSYSKIKNDPTNSLAIKTNKIITSSTSLIDPTKRPSLKPSAARPPRFYGLPKIHKEGTPLRPIVSTINSPTYRLARFLSDTLLPFTGKTASAVLNSAQLVSMVKDVVLSPDDILVSFDVVSLFTKVPVPDTIEIIENLVQHGLDPDTPALVRHCLNNTYFTWNGSFYKQNEGTPMGSPLSPVIANIFMEKFESDAIQTSTLRPSLWKRYVDDTFVIWPHGLPALNLFLHHINSRHPAIKFTMEVEKDGKLPFLDVLFERRPDGSLGHSVYRKPTHTDSYLKPDSHHHPAQKNSLIKTLYHRAHCISDQHHLTSELKHVHLALKRNGYSDRTIRQAVSPSIQKQPLDTPVKTITLPYIAGVTKKISKILNKHKIQVRFNTVHKIRDLIPSVKDVIPDLQYPGVYKLSCTCGDCYIGETKRHVSDRIREHKSDLKHGKTNSSAVADHCYNAVGDHDIIFSDTKVLCKPTGFYQRFVHEAIQIYKHRHNFNREDGFKLSNHWKDVLNRTKH

SEQ ID NO: 2379 - protein, 334 aa, synthetic construct
  source 1..334: note = Description of Artificial Sequence: Synthetic polypeptide
MGSPLSPVVANVFMEKFETDAIQASTLRPSLWKRYVDDTFVIWPHGLPALNQFLNHINSIHPAIKFTMEVEKDGKLPFLDVLIEKRPDGSMGHSVYRKATHTDAYLKPDSHHHPSQKNSLIKTLHHRARCISDHHHLASELEHVHQALKMNGYSDYTIRKAITPTVGKEPSEDPIKTITLPYIAGVTKNISKIMSKHKIQVRFNTVHKIRDLIPSVKDVIPDMQYPGVYKLSCVCGSSYIGETKRHVSDRVREHKADLKHGRTNTSAVADHCFNAVGSHEIDFSKTKVLCKPTGYQQRFVHEAIQIYKHRHNFNREDGYKLSNHWKDVINQFKS

SEQ ID NO: 2380 - protein, 719 aa, synthetic construct
  source 1..719: note = Description of Artificial Sequence: Synthetic polypeptide
MPIKMVRPRRLMDPDGFLRSLGDLPASSRGDPVDALVTRYNSEMARAIDTIAPERPLSLRRAKPAPWFTEELAVMKRERRGLECVWRKLRSESDRARAKALRKAYSVALRAAKKSFQTARIAAAKNRPSELFRVVGELLNGTPQTGPPDDLAENCAAFSHHFADKVAQIRSELDATVDAVSEEVARAPVCPILMDSFQLVQPDDVDKILGEVRATTCALDPCPSWLVKEARGGLVEWVRVVINASLREGIFPSCLKQAVVKPLLKKPSLDPTNWNNYRPISNLPFLGKVLERVVASQLQGFLDDTDFLDPSQSGFRPGHSTETALVALVDDLRRELDRGSVTLLVLLDISAAFDTIDHGILLGRLLGMGLGGTVLQWLQSFLEGRSQMVKLGDTCSDPWPLTCGVPQGSILSPMLFNIYMKPLGEVIRSFGVRCHLYADDTQLYYSFPPASKEAPQILNQCLAAVSDWMRANKLKLNPDKTEVLLVSRKSDRGIGWQPVLDGVALPLKAQVRSLGVLLDSSLTLEAQVSAVAGRAFAQLKLVRQLRPYLVKSDLATVVHALVTSRLDYCNALYVGLPLKTARKLQLVQRSAARLLTGANYRERTTPLFKELHWLPVIFRAQFKVQVITYKALNGLGPTYLSDRISPYEPARRLRSSGEALLSVPPPSQVRLVGTRERAFSAVAPRLWNSLPREIRQAPTLLSFRKQLKTWMWDQAFGPS

SEQ ID NO: 2381 - protein, 846 aa, synthetic construct
  source 1..846: note = Description of Artificial Sequence: Synthetic polypeptide
MSASLPPANAGGDGNWFDMKRDYQFSSQDEHNRNNIPHISLAPTREDSIQMCTIAAKIKNHQTINIGAIYCPPAHEWIDTQFKQVFDSLGSRFIVAGDWNAKSQWWGNARSCRRGAALLKCIQENDQSILATGSPTHFPSNRRHMPSAIDFAVYKGIRHNLIHIETSYDLGSDHNMQIIKLLLRPEYGKKKILLPKNANIRRFQAHLEQRIHLETELHNGDDIDDAVAILEKNIYIAAELASQTSSNQHTVYGPQNFHLDSQTLKAIKIKRILCKINQKDRCSNPLIARTINQLTNRISKRIKLQKDKQMNRLLHDIDPTDRYSMQKLWRLTNTIKRQPIPNLPVRRHVAEGQQAPADPWCKTTEEKAEAFAQHLEARFTPKITAALEDREEINAVLQENGPDEAAQIIRPVTIQELKSEIKKLKTKKAPGLDSIDNRVIKSLPTSAIEYLLLICNSALQFGHFRKSWKCAKISMLRKPGKPSDRLESYRPISQLTGFSKILERLILKRLFEEESFAMAIPNHQFGFRSQHSAEQQIGRVTQFILRSYEAQRHCSAVYMDIQEAFDRVWHQGLLCKVKTIIPDNLYILLTSYLSDRSFHVVCCNNITSSLKHITAGVPQGSVLGPVLYNLYTADMPQPPRHANSTQMLATYADDAVYLVSALSPKQANENVERLLADALSWSKKWGITISLAKTAHVLHTLSPVQQHTPAPRLAGQLLAKKSVMPYLGIHMDTKLNFNKHVAAIVTKTRARIKKLDWIIGRNSKLPLPPKVLLYKQLIAPIWQYALPVWGPLTSSMQMAKLQTIQSKALRAMTNAPRYVSNNALHADLQVATVEEVYNRLCRNCYT

SEQ ID NO: 2382 - protein, 1284 aa, synthetic construct
  source 1..1284: note = Description of Artificial Sequence: Synthetic polypeptide
MKMSHNRDTPSNGVKGTSVRLGTSLVRSPVGEAGAVRERGTHPSESVSQDSDASVNATGEGSVREQAPLSPPGAEEATVPTQRRTRHKWSKEDRVVLWECFVASKREGPGYLKRLKQLWDERGIPGNFPQASLSGQIRQICSKNLLSEEERLQIAARMEAQVASPSADEPARQVPTRPVTPPRSPPVEPARRPSIPSEETPDLGAVPSEIDSADPNRSPSRGPRHLPAHNMSQSESEDDVTDPDVSDQQRSDSLEPRDLLRNSSVESTPGHPNQELSDTLLSNYVPSEIDSDDPNQSPRRGPRHLPAHDMSLSDSMDEETEPDLSDQQRSDLLELRDLLRNSSVETTPKGHPSLRHLPEPKIRAAAFRVNSVIGKIHTNNITETNALIKAGADLAVRILEVQPRPQRTQRKKDPPWKHRLEKNIAEIRKHLSWISEWRRGNLHDEEKKTLLESRYRCLEVGLTNLEDTLKQRLSAKRSKVRRFEARVAGFHQNQLFNTNQKRLYQTLRGEETSSDSPNAEESIRFWSDIWSKEVRHNNAAEWLHDVKEKNVAADPDLTITSQQLKKQLSKTKNWKAPGPDMVQGYWIKTFTSLHSRIAAQLNHCLQRGTVPTWMTTGKTVLIQKDKAKGTEVSNYRPITCLPLMWKVLTGIIYERVYQHLDSKKLLPDEQKGCRRNTRGTKDHLLVDKLLTKDARSKKKNLSMAWVDYKKAFDMVPHSWILECLDIYGIAGNIRNLIATTMPNWKTQLTSANKHLGEVSIRRGIFQGDSLSPLLFVLTMIPLSETLNKAGQGYNYSRTMKLNHLLYMDDLKLYAKSKDQVEQLLNIVHQYSQDIKMQFGISKCGVLNIERGEVTASEGIIIEEGTIKDIEETGYKYLGVMEYNTILHRTMKDSIRKEYLTRLRLILKSHLNGGNTIKAINTWAVPVVRYSAGIINWTKKDCTDMDIKTRKLMTIYRALHPRSCVDRLYINRREGGRGLISVEDCVEAEKRALSQHFRESDDPWARCLIEAKLLKETETADQFKERRRLDRTNKWKSMKMSGQYLEAVQDKIVPDSWNWLLRGELKRETEGTILAAQEQALRTRYIQNKIDKRNVPSTCRICRSSDETINHVISECGVLAQKEYKRRHDKVARHLHWTLLRIHNFPVSERWYEHEPAPVVENEAVQIYWDKRMETDRVLHANRPDIVVKDKQEKSAKLIDVSIPFDSRIIDKEAEKKEKYRDLAIELQRLWQMKVDVVPVVIGALGAMSKNLKTALRELKCGHLHPGTLQKSALLGTAHIIRKVL

SEQ ID NO: 2383 - protein, 550 aa, synthetic construct
  source 1..550: note = Description of Artificial Sequence: Synthetic polypeptide
MNELIAFFKISVQNVCDQGSCYSSHQFTAQGVRSAVSKLKDKSDCKDNFMSNHVIHGGDTLFVHLSFLFNCMISHTCDPKQLRMSVLIPIPKNRRKSLSVSTNYRSIALSSIVGKVFDRMILTEHVNIFSTSNLQYGFKPKHSTVQCTFVLQNVINHYKSRGSPCYVMLLDASKAFDRVQYVRLFYLLRERGLCARIFMLLALLYTNQSMCVRWKNCISDNFSCSNGIKQGGVLSPTLFCIYFDELLIRLKHCGSGCHLGHLFTGALSYADDVALLAPTLTAAKVMLNVCEQFANNFNVLFNADKSALLVCGRPIRKEVNLRLNGRIIQQNSTAVHLGTTIGDNSSTRNVKKAASDLYCLTNVLMCKFGHCSIDVLSALFFFFFFYCSSFYGCPLWDLRNIEPILTAWRKCLKRIWKLNIRTRTKYINNLPKGNLISALLIRSLSFYMQCLSSSNAIVKLASNYCFYGCMYSVISENVHLCSVLSSVPLRFIFDDFENVKSIIQRGMYDEATIAESLALKDLCYLRDGLMFLNFEITSEELLCAFNHFTI

SEQ ID NO: 2384 - protein, 1137 aa, synthetic construct
  source 1..1137: note = Description of Artificial Sequence: Synthetic polypeptide
MENQTQTKSILARSSPRIKRTAVDAADSGHPSTSGLRNHQNPNEQSQKRQKYTMPENRTIMKCYYKSEPQRRGYQKRMHQLWKQEYPDSQITEPRLADQRRFIIRNKVFSEVELEEIQKICKVNYHQTTAQTAAETPATLGMVEQIEPEESVELLQEFEEPALETSVEPPGTLTARQQELKDKIMAHAAANAIRKRLPTLKTVPKRHLAPLMKDVNAALSTVQITSIEQTNQYAYSAAVIVTEELGLLQPRQPQRKSTGKPKWKVRLELKIKKLRSDASNLKNMKEKKLKNDKIKQYLIRKYWLNTRKIEEALEIVKEQITATARKIERYEARIIQYRQNQLFQSDQRRFYQSLNQTTDTVTIKPEKTATTKFWKELWENNKNYNKNAGWIKEFEGKFSQNKMELMEITTEMISKRVQKVKNWTSPGSDQLHGFWLKHLISLHGKMAQQFNEMLQKGSISEWLTTGRTYLIQKDPAKGAAPGNYRPITCLPTMFKLLTGIIADRIQDYLEEKNILPDEQKGNKRKSRGTKDQLLIDKMILENCKSRKANLHMTWIDYKKAFDSLPHSWIIKCLDAIGICKNVGTFIENMMEHWKTELFVGNESYGLVNIRRGIFQGDSLSPLLFIIAMIPLSTILQKTNLGYQTSKNSHKISHLMYMDDLKLYGKTETEIQSLTNTVRIFSTDINMEFGLDKCSTVALKKGKIIESEGINMPNGQTIKCHQPEAYKYLGILQLDNIKHEHVKTVVSKEYTQRVRKILKSKLNGGNTIKAINTWAIPVIRYTAGIINWTQVELDNLDRKTRKLMTIHHSLHPRSDVDRLYLPRRSGGRGLLQVKQAVKEEEHALAEYVKQSEEPALIEVKNQKLLKTQQTKNQYKKTALQTRADSWHNKTLHGKFLDKIEGKADKEKTWLWLTNGTLKKETEGLILAAQEQAIRTNAIKAKIEKSADDPKCRLCKETDETIDHILSCCKKIAQTDYKQRHNYVAQMIHWNLCLKYHLPAAKNWWDHKPAKVLENEHAKILWDFRIQTDKVLEHNTPDITVVEKNKVWIIDVAIPGDSRIDEKQQEKLSRYQDLKIELQRLWQKPVQVVPVVMGTLGAVPKDLSRHLETIDIDKITICQLQKATLLGSARIIRKYITQS

SEQ ID NO: 2385 - protein, 1080 aa, synthetic construct
  source 1..1080: note = Description of Artificial Sequence: Synthetic polypeptide
MYSKRFQPSNETLAISHDVQPGCTPVSLVEASYPLVTVEPILPATSSHPGPVYEYGEEVFQTLFAGKYSCDSSNFSPVTSVASSDIPTRKSDTKSAAPDDFASDNPANRLPNVITDDLNNNQSCHALRFYYQNVRGLRTKVDSFFLAVSECDYDVIVLTETWLDDRFQNAQLFGSKIIVYRTDRNAANSSKRRGGGVLIAVSTHLNSFIDPTLTSIALEQLWIKISTPSRTISVGVIYLPPDRRDNMDYIRDHLNSMNSVLSNLALNDCVLQFGDYNQPNLLWEASDDGFLRVNSQSILSTAGSTLVDGFHFHGLTQLNGIPNRNSRFLDLVLGNDEARYSCNVTEAIEPLSDLDVDHPALDVILNLPDSITFEDCSDNSQMYDFRQADYAGIHAAISRIDWQPIDDANNIDDAVTYFNHVVQDIIAQNVPLCRPKPKPPWSNSHLRQLKRNRAKSQRHYCRNRSQFTKQEFNRASNAYRTYNRLLYRRYVVRTQTSLRRNPKRFWSFVNSKRKEVGLPRSVHLDGQTATSEQEKCFLFAQHFQKTFHDSPATADQIAAAIEYTPRDVFDFRSFTIDEQTIQAAFRKLKMSHAPGPDGIPSCILKNCSHSLATPLAKLFSRSLQEGKFPDEWKVSSMFPVYKKGDKKDVHNYRGITSLCSCSKLFEILINDALFNSCKSFISTAQHVFFPKRSVTTNLTEFVSLCLLTLDSGGQIDTIYTDLKAAFDRVDHGILLAKLDKLGVSHSLVRWFESYLTNRLLYVKIGSSQSESFTNLSGVPQGSNLGPLLFLLFINELSQLLPPGCRLFYADDVKIYMIIDSTADCELLQSRVNIMANWCSSNFLTLSVNKCNVISFHRRQKPIIFDYRICDTVLNRVDQVKDLGITLDQEMNFKPHYNDVIAKANRQLGFIFKLSDDFRDPLCLKGLYCSLVRSILEFSVVVWCPYQSCWIARLESVQRRFLRYAFRHLPWRDPLNLPAYEDRCRLLGIETLEQRRRRAQAVFAAKLIVGDIDSPELLRQLNIYAPEQVIRQRNFLQLVPCNRLYGMNEPLRASADALNEAFTAFDFNLPLISFIRRLSLS

SEQ ID NO: 2386 - protein, 1221 aa, synthetic construct
  source 1..1221: note = Description of Artificial Sequence: Synthetic polypeptide
MKANPAMETRSMRNRRMRSPEEGAPTGAGPGTGDRASGQRLEEDNVQERPSSQRAQPVPRTRNRNGSSRNHQGHAAPTDVAVADRRQSLTLAGGRRQRIMWTREMNMYVIRCYYVCTRMETDMSGRSGMLEMFNERFPRFARQLDLNKLYTRQRAIMSHNMLTAAEVEYIKLEVQREIGEEGTRSSDTSRRSSVGLDAPITSESRDSPAPTAPGPTADMQRQQLRDELALHMGTAVTQFRGTDPMSRHRIPKLRYSYRLTSAVSILNQDILPQYLEAVENLEDLQFIVYSAAIAVVKTLGLRTRPQGEDGTRPNAQKPVWMRRLESRIATLRSKVGRLTQYKQGNRSTRLVRHVAEIVRPAELRDLREVDITEILDTHVQRLSALAKRLRRYGECSKRKEQNRMFNINEREFYNRIRNDKVDFGEGLPEIGDVTQFWANLWENPTEHNGDGMWLAEEERQCDGIGDMTAVVVTAQDIREATRYTRNWAAPGPDFVHNFWYKKLTTIHGRMAECFNTVLGDPTQLPEFITRGVTFLLPKDQHTADPAKYRPITCLSSLYKVLSSVIARRVQAHCDANNVMTEEQKGCRRNTQGCKDQVIVDAVIVGQATQKQRNLSMAYIDYKKAYDSVPHSYLLKVLQLYKVDGNVIRLMQHAMGMWSTSLHITDGTAVLRSRTLSIRRGIFQGDTFSPLWFCLAMNPLSKALNQCNYGYQLKSGERSTRVTHTFYMDDLKLFAESVQRLHQLLQLVTTFSNDIRMEFGIDKCRSIHLRRGQVMDASCFRVNEQEEIRNMVEGETYKYLGFLQLRGIRHTMIKKELQEKFLSRVNCILKSFLSAGNKVKAINTFAVPLLTYSFGVVKWTKTDLEAIERAVRVAFTKHRMRHPKSSIERVTLPRAAGGRGVTDIQALCVSQIQQLRAYFVESQNRHEIYRTVCEADHGFSALHLAQEDYQLNCDIKTVDEMIAMWKQKELHGTHPHQLELEHIDKVASNTWLVRGDLFSETEGFMVAIQDRVIATKNYRHYILHEDVEDRCRKCNSVGETIEHVVAGCSVLAGSAYLDRHNEVAKIVHQQLALKHNLVDRFVPYYKYLPDPVLENSCIKLYWDREIITDVLIRANRPDIVVYDKRMKRVTLIDIAVPLDHNVQSTFSNKIAKYHDLAEELKQMWHLEDVRIVPVVLSATGIVPKSLLRSLDELELKKDLHSIQKAVILGTCSIVRRFLNHHN

SEQ ID NO: 2387 - protein, 1020 aa, synthetic construct
  source 1..1020: note = Description of Artificial Sequence: Synthetic polypeptide
MNQRHYCAKARSLPGSNAPYGSSTVSNEQEPLHRCPDVVLNEQGFSRFRERTRVNKLVHKVKGKGRSDRRLRFGTWNIGTLTGKSMEVVDTMTRRKINIMCLQETKWVGAKARELDTSGFKLWYTGKVKNRNGVGIIVDKQWKKDVVDVKRVGDRIISIKLVVEGGAFHVISAYAPQVGSDEQHKIRFWEDLESLVQGIPLGDKIFLGGDLNGHVGREVTGYGSIHGGHGFGVINAEGKTILDFSSTFDLLIANTCFKKRDEHLITYKSGMTSSQIDFFLLRRVDRKFCINCKIIPGESLTTQHRVLVMDFRVEQKLRKRHHTKNPRTRWWRMKGEEQRSFLRRVGEEAKWDGNGSAEEMWREMAEVIRRTAKESFGESKGIGPRDKESWWWNASIQEKIKIKRECFKEWSLCRNADNWEKYKAAKKETKVAVSEARTRAYEGLYQSLGTKEGEKGIYRIAKSRERRTRDLDQVKCIKDKDGEVLAQEEKINERWKSYFYELFNEGQKTLPSLGRLCTREEDQNFDYYRRIRDFEVKEALKQMKNGRAVGPDNIPIEVWKGLGEKGINWLTKLFNEILRSKKMPDEWRKSTLVPIYKNKGDIQSCGNYRGIKLMSHTMKLWERVIERRLRKETQVTENQFGFMPGRSTTEAIYLLRRMMERYRSNKRDLHMVFIDLEKAYDRVPREVLWKVLEKRRVRIAYIRAIKDMYDGATTSVKTQGGVTEEFPIGIGLHQGSSLSPYLFTLVLEVLTEHIQEPVPWCMLFADDIVLMGESREDLNKKLELWREALEVYGLRISRSKTEYMECKFSLRRENPNIEVKIGENILRKVKSFKYLGCIIQDNGEIEQDVNHRIQAGWSKWRSASGFICDKKVPLKLKGKFYRTAIRPAMLYGTECWAAKGEHEHKLSVAEMKMLRWMSGHTRLDKIRNEDIRERVGVAPIVEKMVESRLRWFGHVRRRPIEHPVRRVDEMEDGQRAKGRGRPKKTIHEVVKRDLHVNGLSVDMIHDRAQWRRLIHVADPT

SEQ ID NO: 2388 - protein, 1271 aa, synthetic construct
  source 1..1271: note = Description of Artificial Sequence: Synthetic polypeptide
MTLEEGNVRYGARPVRTHQAGAVPGPKPRRGPPQRLEGLPSSWSARRRGRKATGNTNTKQVKKSLNIMHWNAEGISNKKTELENFLKDNEIHISCIQETHLQEEASFKVRGYQCFRNDRQGRKKGGVLTLVRNNLNTVEIKKYTGEAEYIHNRITTSRGNLDLVNYYCPNDTNLVLETIEVPDTDFIIAGDFNSQSQSWGYNRLDRRGEEIEAWQDENHLLLVNDPLDQPTFYSRAWHSTTTPDLALCTENLHRHLSRKVETQLGGSDHRPVLLTIVESLPEDSPKRPRWNYKKADWRLFSIRTNELTKNIAVFGKNINNAIREFNENILKSAKETIPRGVRKNYTPYWTPELQKTHNDLIKAREEAETHPGRENNNKLQRCKAHYLKTKLECTRKSWRDKTHKLNLEKDTTKLWRLVKGLSDEGNKNDKISLEVEGEMEMEKRAAHTFVKAYAQESNIKIPRERQKEVRQEERRKRSTNNIPEAMEKDITMEELKKAINQLKQRKSTGPDEITNEMLQHLGNTALQTLLDIFNLSWKIGQVPQCWKEATMILILKPGKSKAQPLSYRPISLISCVCKTMERIIACRMQWYLETQHIIVPEQAGFRQFRSTEDQTIYLSQVIEDSFQAQKVMLATFVDLQKAFDKVWKEGLLVKLLRSGIQGNMYQWTKSYLHNRRARVLVDGYQGRKMLLRQGVPQGGVMSPLLFILFINDLMNELPKGIHAALYADDLVLWCSEEFVTTATYRMQLALDKLTTWTKTWCVTANKEMSSATLFTLSQAEPKHLTLDKTPLKFENQQKYLGIIFDKRLTWKQHIQNAENKARKKLNIMRKLAGTQWRANEKTLRQVYLGAIRPHLEYGSSAWMTAAQTHKYTLEKVQNQALRIITGAMRSTPIEKMEQKTSIVALQRRWECKALVQYTKATAMEDHILHTRTERSNTARLKRSNFIKESRKIQRSLQDHLPATVNMLNHTPEAPSWEKKNTNISIHTSIPMFTTKDDHSDLSKKSLTLSMLEERYPREAWIRIYTDGSATDAVKRGGAGVYVQFPNRRRQAEAVPTGRHCTNYRAETEALVQAANIIKNVVDPQSQVVFLTDAMSVLQAINSGKLPRLRKEIEDIPCLRIMLQWIPSHCGVLGNEQADRMAKLGAQKEQPDNSVNYTEIKTIINTLFKAPQTPDGYHELSRQEQVIIFRLRTQHTRLRQLMYKCFKIVQSPKCQCGEADQTVEHILQHCKTHRALRQETWPTPLTLEEKLYEPPDELTRTAQFMTDTGLQV

SEQ ID NO: 2389 - protein, 903 aa, synthetic construct
  source 1..903: note = Description of Artificial Sequence: Synthetic polypeptide
MGDMQRRVIGWWPINERMCKLRIKGRFFNFSIINVHSPHSGSTDDDKDAFYAQLEREYDRCPSHDVKIIIGDLNAQVGQEEEFRPTIGKFSAHRLTNENGLRLIDFAASKNMAIRSTYFQHSLPYRYTWRSPQQTESQIDHVLIDGRHFSDITDVRTYRGANIDSDHYLVMVKLRPKLSVINNVRYRRPPRYNLERLKQPDVANAYAQHLEAALPDEGELDRAPLEDCWRTVKAAINDAAESVVGYVERSSRNDWFDEECQEVLEEKNAARAAMLQHGTRQNVERYRLKRKQQTRLFRDKKRRLEEVECQEMELLYRSQETRKFYQKLNTSRKGFVPRAEMCRDKDGSILTDGREVIERWKQHYDEHLNGAENTGTEGQDSEGDGYVSTADSGNQPAPTMGEVKDAIQQLKNNKAAGKDGIGAELIKMGPDRLAACLHRLIVRIWETEQLPEEWKQGVICPIYKKGDKLECENYRAITILNAAYKVLSQILFRRLSPIANEFVGSYQAGFIDGRSTTDQIFSVRQILQKCREYQVPTHHLFIDFKAAYDSIDRIELWKIMDENSFPGKLTRLIRATMDGVQNCVKISGEHSSSFESRRGLRQGDGLSCLLFNIALEGVMRRAGLNSRGTIFTRSGQFVCFADDMDIIGRKFETVADLFTRLKREATRVGLMVNASKTKYMLVGGTERDRTRLGSSVTIDGDTFEVVDEFVYLGSLLTADNNVSREIRRRIISGSRAYYGLQKKLRSRKIHPRTKCTMYKTLIRPVVLYGHEAWTMLEEDLQALGVFERRVLRTIFGGVQENGVWRRRMNHELAQLYGEPSIVKVAKAGRIRWAGHVARMPDNNPVKMVFATNPVGTRRRGAQRARWIDQVHQDLESVGHSRGWREAAMNRGNWRNIVGEALSR

SEQ ID NO: 2390 - protein, 1007 aa, synthetic construct
  source 1..1007: note = Description of Artificial Sequence: Synthetic polypeptide
MGSIPNFSPTTKNGERRNNERYFRQPTWQRNKDYEWKLGTWNVRTLNEPGRASLLARELQKVGVGVAAIQEVRWPRSGEREFRAVDPIANTTFKYNIYHSGGDKAEHGVGFIVIGKQMKRVMKWKPISERICVLRIRGKFFNYSLINIYAPTNDKPDDVKDAFYEGLDKAYGECPKHDVKIVIGDANAQVGREDFFRPIIGKESLHSVTNDNGLRLVTFAAARGMAICSTYFARKDIRKHTWRHPNGDICNQIDHILVDGRHFSDVIDVRSFRGPNIDSDHYLVVSKIRARLSTVANSRPQRTMRFNIQRFSADGVTAEYHQKLDERISEVNVSENLNNLWDAIHGVVSETAREVIGTARRRPRSGWFDEECQRVTDEKNVARRRMLVSGTRLNRERYREARSAEKRIHRRKKKEFDENVIAEAQNCMEQNDMRRFYETVNGVRRKSAPSPVMCNDREGNLLTDKTMVAARWKEHFETLLNGGNDRASENRMNIDNDGQAVEPPSLDEVKKAIKELKNNKAAGKDELPAELLKHGSEQLHRIIHHILLRIWEEEELPASWMDGLICPLFKKGHRLECANYRGITLLNSAYKIMSRILFNRLRPLEESFVGEYQAGFREGRSTSDQMFTLRQILDKFREYNLQTHHLFIDFKAAYDSVKRNELWEIMMEHGFPTKLIRLIRATLEGSKSSIRVADEISTSFVTLDGLKQGDALSNLLFNIALEGAIRRACVHRNGTIITRSYMLLGFADDIDIIGIDRRAVEEAYVPFKRETTRIGLIINTTKTKYMVAGRHRGPIGDVGSEVVIGGDIFEVVEEFVYLGTLVTCDNDVTREVKRRIAAASRAFYGLRNQLKSRSLQTKTKLALYKTLILPVALYGHESWTLKEVDRRAFGVFERKVLRTILGGKLDNGIWRRRMNHELYQVYNEMDIVKRIKHGRLRWAGHVARMSEERQAKQIFSREPGRGRRLRGRPRTRWLFAVEEDLRSLNVQGDWKRLAQDRVQWRRLLHSA

SEQ ID NO: 2391 - protein, 1007 aa, synthetic construct
  source 1..1007: note = Description of Artificial Sequence: Synthetic polypeptide
MGSISNFLPTTKNGERRNNERYFRQPTWQRNKDYDWKLGTWNVRTLNEPGRVSLLARELQKVGVSVAAIQEVRWPRTGEREFRAVDPVANTAFKYNIYHSGSDKAEHGVGFIVIGKQMKRVMRWKPINERICVLRIRGKFFNYSLINIYAPTNDKPDDTKDAFYDCLDKTYGECPKHDVKVVIGDANAQVGREDFFRPIIGTESLHSATNDNGLRLITFAAARGMAISSTYFARKDIRKHTWMHPNGELCNQIDHVLVDGRHFSDVIDVRTFRGPNIDSDHYLVVSKIRARLSTVANTRTQRPLRFNIQRLSTEGVADEYRRKLDERIRGYNVGENLNNLWESIHGAMSTAAREVIGTAQRRPRNGWFDEECQNVTDEKNVARSRMLVSGTRQNRERYKEARAAEKRIHRRKKRQYEEDIITEAQNSIEQNDMRRFYETVNGVRRKTAPSPVMCNDREGNLLTDKILVAARWKEHFEQLLNGENTSASENRLIISNDGQAVEPPTLDEVRRAIKELKNCKAAGKDELPAELFKHGSEQLYEILHRTLLRIWEEEELPASWLEGLICPLYKKGHRLECANYRGITLLNSAYKIMSRVLFNRLRPLEESFVGEYQAGFREGRSTTDQMFTLRQILDKFREYNLQTHHLFIDFKAAYDSVKRNELWQIMVEHGFPAKLIRLIRATLDGSKSSVRVADETSTSFVTLDGLKQGDALSNLLFNIALEGAIRRAGVQRSGTIVTRSHMLLGFADDIDIIGIDRRAVEEAFVPFQRETARIGLTVNTSKTKYMIAGRQRGSNRDVGSEVVLGGEKFEVVEEFVYLGTLVTCDNDVTREVKRRLAAANRAFYGLRNQLKSRSLQTKTKFALYKTLILPVALYGHESWTLKEVDRKAFGVFERKVLRTILGGKQENGIWRRRMNHELYQVYKEVDIIKLIKHGRLRWAGHVVRMPEERQAKIIFSREPGRGRRLRGRPRTRWLFAVEEDLRALNVQGDWKRLAQDRAQWRRIIHSA

SEQ ID NO: 2392 - protein, 1018 aa, synthetic construct
  source 1..1018: note = Description of Artificial Sequence: Synthetic polypeptide
MHDVGSATLVRWPIEDSSPTKKGKSRANGLILRQQTRQRIKDNDWKVGSWNVRTLNEPARVGLLARELRNVGVNVAAIQEIRWPRTGEREFRAVDPIANTSFKYHIYYSGGDRAERGVGFIVIGKQMKRIIRWKPVSDRICVLRMKGKFFNYSLISIYAPTNDKPDDMKDEFYESLDKAYGECPKQDVKIVIGDANAQIGKEDFFRPVIGTESLHSVTNDNGLRLVTFAAARGMAISSTYFARKNIRKHTWRHPSGDACSQIDHVLVDGRHFSDVIDVRTFRGPNIDSDHYLVVAKIRARLSSVTSSATHRTLRFNIQRLSTDGVAAQYRQQLDEKLGRVNVAGDVDSLWDPIHEAVTTTAREVIGTGQRRRRNDWFDEECQRVTDMKNVARSRMLVAGTRQNRERYRAARAEEKRIHRRKKRQHEESVVADAQESMNRNDMRRFYATVNGARHNTVPVPAMCNDREGNLLTDKTAVAARWKEHFQQLLNGENGNVARNRMNIDDDDQAVDPPTIGEVKKAISELKNCKAAGKDEIPVELLKHGSEQLYQSIHRVLLKVWEDEELPTGWLDGLIRPIYKKGHRLECANYRGITLLNSAYKILSRILFNRLRPLEESFVGEYQAGFREGRSTTDQMFSLRMILDKFREYNLQTHHLFIDFKAAYDSVKRNELWQIMSENGFPAKLIRLIRATLDGSKSSVRIADEVSTSFVTLDGLKQGDALSNLLFNIALEGAIRRSGVQRNGTIITRSHMLLGFADDIDLIGIDRRSVEEAFVPLKRETARIGLTINSTKTKYMVAGRDRVRHGGVSAEVVFDGDVFEVVEEFVYLGTLVTCDNDVSREVKRRVAAANRAFYGLRNQLRSRSLQTETKFALYKTLILPVALYGHEAWTLKESDRKALGVFERKVLRTILGGKLENGVWRRRMNHELYQVYKDANIINRVKYGRLQWAGHLVRMSEERIAKIIFSREPGRGRRLRGRPRIRWLYAVEEDLATLNVRGNWRSFAQDRRRWSSTIRPAMA

SEQ ID NO: 2393 - protein, 1014 aa, synthetic construct
  source 1..1014: note = Description of Artificial Sequence: Synthetic polypeptide
MGSIPNSLSTTKNGERRRNERYFRQPTWQRNKDYDWKLGTWNVRTLNEPGRVSLLARELRKVGVCVAAIQEVRWLRSGEREFRAVDPIANTAFKYNIYHSGGDKAEHGVGFIVIGKQMKRVIRWKPINERICVLRIRGKFFNYSLINVYAPTNDKPDDVKDAFYECLDKTYGECPKHDVKIVIGDANAQVGKEDFFRPIIGKESLHSVTNDNGLRLVNFAATRGMAISSTYFARKDIRKHTWQHPNGELCNQIDHVLVDGRHFSDVIDVRTFRGPNIDSDHYLVVSKIRARLSTVSSSRNRQSLRFNIQRLSADGVAADYHQKLDERISEIDESVNLSDLWESVHGAVSTVAREVVGTAQRRPRNGWFDEECQRMTNEKNLARSRMLVSGTRQSRERYKEARAAEKRIHRRKKKEHEEAVIAQAQEAMEQNNMRRFYESVNGVRRKTAPSPAMCNDREGNLLTDKTMVAARWKEYFESLLNGDNGSGSGSRIQIDDDGQAVEPPTLDEVKKAINGLKNNKAAGKDELPAELLKHGSEQLHELLHRIISRIWEEEQMPTSWLEGLISPLYKKGHRLECANYRGITLLNSAYKIMSGILFNRLRPYEESFVGEYQAGFREGRSTTDQMFTLRQILDKFREYNLQTHHLFVDFKAAYDSVKRNELWQIMSEHGFPAKLIRLIRATLDGSKSSVRVVDEISSSFVTLDGLKQGDALSNLLFNIALEGAIRRAGVQRSGTIITRSHMLLGFADDIDIIGIDRRAVEEAFVPFKRETARIGLTINTTKTKYMIAGGQRGSGRVSGSEMVLGGDKFEVVEEFVYLGTLVTCDNDVTREVKRRIAAASRAFYGLRNQLKSRSLQTKTKLALYKTLILPVVLYGHESWTLKEVDRRAFGVFERKVLRTILGGKLENGIWRRRMNHELYQVYKEVDIVKRIKHGRLRWAGHVARMPEERQAKIIFNREPGRGRRLRGRPRTRWLFAVEEDLRALNVQGDWKRLAQDRAQWRRLIHSAQIHRSEL

SEQ ID NO: 2394 - protein, 997 aa, synthetic construct
  source 1..997: note = Description of Artificial Sequence: Synthetic polypeptide
MKSSVQEAYNVNSDRNNRHRPRHRKRTNDWKLGSWNCKSLNFLGSTRILSELLRVRKFDIVALQEVCWKGSTVHTYRDGYTIYQSCGNRHELGTAFIVMGEMQRRVIGWWPIDNRMCKLRIKGRFFNISIINVHSPHLASDDDDKDAFYAQLEREYDGCPSHDVKIVIGDLNAQVGQEEEFRPIIGKFSAHQLTNENGLRLIDFAASKNMAIRSTYFQHSLPYRYTWRSPQQTESQIDHVLIDGRHFSDIIDVRTYRGANIDSDHYLVTVKVRQRLSVVNNIRYRRPPRYNLERLKQPEVATEYAQSLEAALPEEGELTEAPLEDCWSSLKAAINNAAEGAIGFVEANRRNGWFDEECQTVLDEKNAARAMMLQQGTRQNVERYKQKRRQQTHLFRDKKRRLEELECEEMEQLYRSQETRKFYKKLNASRKGFVPRAEMCRDKDGGILTDEREVIERWKQHYDEHLNGAEEEDQDSRRNGFISTADEGDVPTPTIGEVKDAIKQLKNNKAAGKDGIGAELIKMGPDRLATCLHRLIARIWDTEQLPEEWKEGIIYPIYKKGDKLECENYRAITILNAAYKVLSQIIFRRLSPLASRFVGSYQAGFVDGRSTTDQIFMLRQILQKCREYQVPTHHLFIDFKAAYDTIDREELWKIMDENGFPGKLTRLIKATMDSVQCCVKISGALSDPFETRKGLRQGDGLSCLLFNIALEGVMKRAGFNMRGTIFNKSSQFICFADDVDIVGRTFQVVAEQYTRLKREADRVGLKVNTSKTKYLLAGGTERDRARIGRRVTIDGDEFEVVDEFVYLGSLITSDNNCSREIRRRIIAGSRAYYGLHKTLRSGKLHFRTKCTMYKTLIRPVVLYGHETWTMLEEDLQALGVFERRVLRTIFGGVCENGVWRRRMNHELAQLYGEPSITKVAKAGRVRWAGHVVRMPDNNPAKMVFNSNPAGTRRRGAQRARWFDQVEQDLGSVGRSRNWRLAAMDRVSWRNIVAQVMS

SEQ ID NO: 2395 - protein, 983 aa, synthetic construct
  source 1..983: note = Description of Artificial Sequence: Synthetic polypeptide
MKNQATNNQRENTNRDNRRRPQRRKGTSDWKLGTWNCKSLNFIGSTRILADVLKDRGFGIVALQEVCWKGSMVRTFRGNHTIYQSCGNTHELGTAFIVMGDMQRRVIGWWPINERMCKLRIKGRFFNFSIINVHSPHSGSTDDDKDAFYAQLEREYDSCPSHDVKIIIGDLNAQVGQEEEFRPTIGKFSAHRLTNENGLRLIDFAASKNMAIRSTYFQHSLPYRYTWRSPQQTESQIDHVLIDGRHFSDIIDVRTYRGANIDSDHYLVMVKLRPKLSVVNNVRYRRPPRYDLERLKQPDVAAAYAQQLEAALPEEGELDEAPLEDCWRTVKAAINDAAESNVGYVGRSRRNDWFDEECQEVLKEKNAARAVMLQQGTRQNVERYKRKRQQQTRLFREKKRRLEETECEEMEQLCRSQETRRFYQKLNASRNGFVPRAEMCRDKDGSILTDEREVIERWKQHFDEHLNGAESTGNEGRDNGGNAFVSTAEDGNQPAPTLREVKDAIHQLKNNKAAGKDGIGAELIKMGPERLAICLHRLIGTIWETEQLPEEWKEGVICPIYKKGDKLDCENFRAITILNAAYKVLSQIIFRRLSPVVNEFVGSYQAGFVDGRSTTDQIFTVRQILQKCREYQVPTPLGIMDENSFPGKLTRLIRATMEGVQNCVKVSGEHSSSFGSHRGLRQGDGLSCLLFNIALEGVMRRAGLNSRGTIFTRSSQFVCFADDMDIVGRTFEKVADLYTRLKREAAKVGLVVNAAKTKYMLAGGAERDRARLGSSVTIDGDTFEVVDEFVYLGSLLTADNNVSREIRRRIISGSRAYYGLQKKLRSKKIHARTKCTMYKTLIRPVVLYGHETWTMLEEDLQALGVFERRVLRTIFGGVQENGVWRRRMNHELAQLYGEPSIQKVAKAGRIRWAGHVARMPDSNPAKMVFASDPVGTRRRGAQRARWADQVRIDLASVGQNRGWRDAATNRVLWREIVDSVLSV

SEQ ID NO: 2396 - protein, 1190 aa, synthetic construct
  source 1..1190: note = Description of Artificial Sequence: Synthetic polypeptide
MQNGAAQVALVQEPYFRRGNFYLGNLVDPVFATFSKLEMANSRSMPRACVLVNKAIVATLISELTTRDVCAVTIDVSVGDLNRKYVYCSVYLPHDEPSPTDDFKRVVVHCVTKGLPLIVGSDANAHHIIWGSSDINLRGSSLMEYLSSTDLGLLNIGNRPTFMVSNREEVLDITLCSNRISHELTNWHVSDEESLSDHRYIFFEHSNVTAQTLRFRNPRSTNWELYIELVATKFHGYSPSIENPSDLDDAVDTTTSYIMEAFEEACPLRSVKTTRGTPWWNSDLTRLRKQCRRSWNRRRSAGSESFKSARKAYKKALRSAERSGWKNLCTNVSSLSEVSRLNKILAKSKDFQVNEIRLPNGDFTSSDEEVLECLFNTHFPGCVDIASTDEPNVFSCSYESLASARSIVTTESIQWALNSFAPFKSPGADGIYPVLLQKGFEFIKHVLKKLLVSSFATGYIPKSWRDITVKFIPKGGRASYEEAKSFRPISLTSFLLKCLERIIDHHIRDVYLANMPLHVNQHAYQSGKSTVTLLHKVVYDIEKAFAQKQSCLGVFLDIEGAFDNVSFDAILEAARNHGLPTMITNWIHQMLKNRHLFSTLRQAAIRKLSVCGCPQGGVLSPLLWNLVADTLLRQLNNCGFPTYGFADDYLALIVGMCISTLFDLMQSALQVVESWCRQYGLSVNPNKTSIVLFTERRNRDGIRPLRLFGTEINVTDQVKYVGVILDSKLSWTPHIDFRVKKACMAFGQCRRTFGKTWGLKPKYIKWIYTTVVRPILAYGCLVWWQKGEVRTIQSKLGHLQRMCLMAMSGAFSTTPTAALEALFDVAPLHIYLKQEALSCSYRLWVLDLLEKNPVNRRSTHTSLFPLLVNWDKIVLAPSDLTIACNFPYRTFTTQFPSREEWTSGYLERSISNNIVCYTDGSLLEGRAGAGVYSRELRLNQFYSLGRNCTVFQAEIFALMCGVQSALQQRVMGKVIYFCSDSQAAIKALASANSRSKLVIACRTQIEELNSVNSVNLVWVPGHSSIAGNELADELARDGASHDFIGPEPAIPISKCWVKLQINSWAATQHKQYWNSLESCRQTKLYITEPSPKVAKYLTNLSKQNCSLLVRALTGHCRLNYHMANIQRADSFVCDSCDSDYGTSYHLICNCPVFAQMRFQLLGKHLLSETEYRSLNLQDILLFLTRCGNEL

SEQ ID NO: 2397 - protein, 1041 aa, synthetic construct
  source 1..1041: note = Description of Artificial Sequence: Synthetic polypeptide
MPHQRDRPSVSWDVKQSWHDGAPARQECWRRPNKPPVKNLIANNIGDNTTRNNRQRPTRRNKDYDWKLGTWNCKSLGFAGCDRIIYDELHPRNFDIVALQELCWTGQKVWKSGHRAATFYQSCGTTNELGTGFIVLGKMRQRVIGWQPINARMCKMRIKGRFFNYSIINVHCPHEGRPDDEKETFYAQLEQIYDGCSPRDVKIVVGDMNAQVGREEMYRPVIGRNSLHAVSNDNGQRCVNFAASRGMVVRSTFFPRKDIHKTTWRSPDNLTENQIDHVLIDGKFFSDITNVRTYRSANIDSDHYLVAVCMRSKLSTVTNSRRSRTPRLNIERLRDSEVAQEYAQQLEVALPTEEQLGAATLEDGWRHIRSAIGSTATAALGPAAPNQRNDWYDGECEQLKNEKNAAWARMLQHRTRANEARYKQARNRQNSIFRRKKRHQEERDREAMEELFRAKDTRKFYEKLNRSRKGFVPQADMCRDCDGNLLTNEREVVERWRQHYDEHLNGDVASSGGGTEITLGARADDERLPPPDLQEVETEIRRLKNNKAAGVDQLPSELLKYGGDALARALHWVISKIWEEEVLPEEWMEGVVCPIYKKGDKLDCANYRAITILSAAYKVLSQILCRRLSPIAREFVGQYQAGFMGERATTDQIFAIRQVLQKCREYNVPTHHLFIDFKSAYDTIDREQLWQIMHEYGFPDKLIRLIKATMERVMCVVRVSGTLSSPFESRRGLRQGDGLSCLLFNIALEGVIRRAGIDTSGTIFRKSVQLLGFADDIDIVARNFETMADTYIRLRAEARRIGLNINVSKTKYMIARGSREDTARPPPRVHIDGDEIEVVEEFVYLGSLVTADNDTSREIQRRIVAGNRAYFGLRRTLRSSKVRHRTKLTIYKTLIRPVLLYGHETWTLRAEDQRALGVFERKVLRTIYGGVQMEDGTWRRRMNHELHQLLGEPTIVHLAKIGRLRWAGHVTRMSDTNPVKMVLENNPTGTRRRGAQRARWVDQVEDDLRTLRRMRGWRRAAMDRVEWRRLLRTAEATQALA

SEQ ID NO: 2398 - protein, 981 aa, synthetic construct
  source 1..981: note = Description of Artificial Sequence: Synthetic polypeptide
MGQGFKLRLLGDGETLIGACPGTNTQESPVDRDTRRATLAGAEGIVLPQHDRKSRVSVGGLRCLYTNARSMGNKQEELALLLSSGHYDLVGITETWWDSSHDWSVAIEGYTLHRRDRVGKKGGGVALYVKEQYTSLEADIGSKEGQLETLWVKLWGGGGERDLTVGVYYRPPNQGEELDLEFSRELTEAAHARDMVVMGDFNYPDISWEEHSAKSDQSRSFLTCIEELFLTQEVHGPTRGNALLDLVLAKGDDLVTDLNIEGSLGDSDHETIMFTVHHKADKSDSRIEVLDFKNANFNKLRSLVGEVLWDQGPKVKGVHEEWLFLKDTILEAQRKSIPMQRKGSRRAGKPSWLNREIMVLLRKKKEAYKQWKLGTVPKEDYTTMAHTCREQIRKAKAATELRLATGIKDNKKSFFRYVGNRRKTNGSVGPLLNNSGQLVTDTQEKAELLNDYFASVFHQTKGKIMPGRVQDEHGRNDHLPTIAVELVYDQLEKLDIYKSAGPDELHPRVLKELAEVIAEPLAKLFQNSWCSGEVPEDWKRANVVPIFKKGRREDPGNYRPISLTSIPGKILEKFIKESICDKLAEGKILNDSQHGFIAGRSCLTNLISFYDQVTHHLDKREEVDIVYLDFQKAFDLVSHDVLMRKLEDCGLNCETVRWVGNWLQGRTQRVLVNGSVSSWREVASGVPQGSVLGPVLFNIFINDLDVGVKSSLAKFADDTKLWGSVVTLEDRLQIQADLDRLASWADQNQMKFNVEKCKVLHLGTNNPQHTYRLGGTKLTSTMNERDLGVIIDHSMNMSHQCDAVASRANNTLACINRCISSKTKEVILPLYSALVRPQLEYCIQFWAPHFNKDVEKLERVQRRATHMIRDLQGKPYEERLRDLGLFSLKKRRLRGDLVAAYHYIRGVHQGLGEQLFTRAPLGKTRSNGHKLLEDRFRLNIRKNFFTVRVSRLWNKLPPEVVQSPTLEIFKRRLDSHLAGVT

SEQ ID NO: 2399 - protein, 910 aa, synthetic construct
  source 1..910: note = Description of Artificial Sequence: Synthetic polypeptide
MGNKQEELALRIASSNPDVVGLTETWWDSSHDWAVNIRGYRLYRRDREGRKGGGVALYVKEHYTSSASSMGSGEGRAEVLWVKIQGGQGERDLTVGVYYRPPNQEEELDREFSGQLAETLKARDVVVMGDFNYPDICWEEQSAGTDRSRRFLAELQDLHLIQEVHSPTRGDALLDLVLAAGDDLVRGLQVLDHLGNSDHRVLEFTIQRRVSRARSKVVALDFRRANFSEMRRLVGEELGSLRAEELSVQEEWSFLKETILGAQGVSIPTRSKAGRSVQKPPWLTKGVRECLLAKRVAYARWKGGVISKEEYTSSARACRRAVRKAKAEIELGLASRIKDNKKSFFKYIGRMKKAPGNVGPLQDMRGNLVVASEDKADLFNQFFTSVFLCRDRDFPAVIEAGREGIAFRPQVGEDRVRELLEGLDAFKSAGPDALHPRVLRELAGVIAGPLARLYERSWCLGQVPDDWKVANVVPIFKKGKREDPGNYRPVSLTSILGKLFEKIIKEHICDGPASEMMLRGNQHGFIRGRSCQTNLIAFYDQVTKAMDAGVAVDVVFLDFSKAFDTVSHPILINKLGDCGIDAYTVRWIADWLKGRTQRVVVDGSYSTWGEVGSGVPQGSVLGPALFNFFISDLDVGVESNLFKFADDTKIWGEVSTLAGRERLQKDLDRLQGWANRNRMCFNTDKCRVLHLGSRNQQHTYTMGSSLLESTEAERDLGVIIDSKMNMGRQCEVMVGRANRTLSCIHRCISSRAREVILPLYATLVRPQLEYCVQFCAPHFRRDVDNMERVQRRATRMIRGQQGRPYSERLRDLNLFSLHKRRLRGDLVTVYKLTRGNQKGLGETLFPLAPAGITRNNGHKLMERRYRLDIRKNYFTVRAARSWNQLPREVVLAPTLGIFKKRLDTYLAGLI

SEQ ID NO: 2400 - protein, 1077 aa, synthetic construct
  source 1..1077: note = Description of Artificial Sequence: Synthetic polypeptide
MLLMHPLHFTTAFALCIVGGGWGRLEGYGDCRVGEGNGCERMPIYNRKLVNQITSFGPGEEKGKGQCDRGGGCSDGWGAPIEVVSGRGRYGKGRPNHLIRPRVFGRTLIVPKRSPDIANLGSQDGGPSRLKVVLFNARSVNGKTSFIQDLILDEHVDLACITETWLDEMGGVNLTQLCPPGYSVQHQPRSGGRGGGVAVVYKDSIPLTRCPVPQSTMFECVHLRVGDRDRLGILLVYRPPRCTTVSLPELAEVVSGLALESRRLIVLGDFNVHAETNLSGAAQDFMAAMATMGLSQLVTGPTHSAGHTLDLVFCQGWEEGGGVEELTIAPLPWTDHHLIRFRLTAPPNLCRGGGPKMVRPRRLMDPEGFLTTLGEFPASSAGDPVDALVSLWNGEMTRAIDTIAPERPLSSNRAKPAPWFTEELAAMKRKKRELECVWRSGYNESDRTRLGSYLRAYAAAIKAARRAHLAANIASAQNRPAALFRVIRGLLTPTNQGGSPDNSAARCEAFARFFADKVALIRSDFDTILTAVSEDVTSAPACPVLLDSFQLVELEDVDKILGEARPTTCILDPCPSWLVREARGGLAEWVKVVVNASLREGKFPASLKMAVIKPLLKKPSLDPTQFGNFRPISNLPYLGKVLEHVVASQLQGFLVDTDFLDPAQSGFRPGHGTETALVALVDDLRRELDRGSVSLLVLLDLSAAFDTVDHGILLGRLAGMGLGGTVLQWLHSFLEGRSQMVSLGDACSAPQPLTCGVPQGSVLSPMLFNIYMKPLGEIIRSFGVRCHLYADDVQLCHSFPPVTKEAVQVLNRCLAAVSDWMRANKLKLNPDKTEVLLVSRKAEQGTGLQPVLDGVTLPLKAQVRSLGVILDSSLSLEPQVSAVARGAFAQLKLVRQLRPYLGKPDLATVVHALVTSRLDYCNALYVGLPLKTVRKLQLVQREAARLITGAAYRERTTPLLRQLHWLPISYRAQFKVLALAYKALNGSGPAYLSERVSRYDPPRSLRSSDEALLAVPSASQVRLAGTRDRAFSVVAPRLWNALPIEVRQAPSLLSFRKRTKTWLWDQAFEHESAAKMR

SEQ ID NO: 2401 - protein, 957 aa, synthetic construct
  source 1..957: note = Description of Artificial Sequence: Synthetic polypeptide
MLTKTSRKIFYCQLDTILSEIPKEDKIILLGDFNARVGRDSDLWPGIIGKDGVGNSNSNGILLLTKCGEHNLVITNTLFRQKNKLKTSWKHPRSKHWHLLDYVITRARDRRDVLLTRAMTGTDDCWTDHRLIRSTMAIKIVPKRRLQGRKTRRKMNTQALQEPSKRALLQTTLKDHLPTEHPENVEEHWNKLKTSIITACEESIGYLTKKHQDWFDDNDKEIQQLIDNKRKAFQTWQRDTNCAAKKKIYASAKAEVQRRTRELKNIWWTKKAEEIQHLADTHDAQGFFKATKIIYGPRNHGIQPLRSSDGTKILKDKTSIALRWKEHYQNLLNRSSNVAEETLSQIPQQQTRDELAALPSLEEVSNAISQQKNNKASGPDGIPAEIFKEGGPELIQQLHQLIEKVWMTEKIPADFKDATIITLFKKGDRTDCGNYRGISLLTSAGKILARILANRLLPVSEDTLPESQNGFRPSRGTVDMIFTARQLQEKCREQNQPLYMAFIDLAKAFDTVNRSALWTILQKIGCPDKFVNILRLLHDDMMATVLDSNGSQSDPFKVESGVKQGCVIAPTLFSIFIAMILHLVDGKLPTGVEIIYRTDGKLFNLSRLRAKTKVTTTSVIELQYADDNVVCAHSEEDLQATLNTFAEAYEKLGLSLNIEKTKVLFQQAPANPSAKPGIQLNGVTLENVDHFRYLGSHLSTKVNIDTEIQHRLSSASAAFFRMKQRVFDDRDIRRETKVLVYKAIVLPTLLYACETWTVYRRHTKLLERFHQRCLRKILQISWEDRRTNVSVLEEAKTTSIEAMLLRHQLRWTGHVVRMPDHRLPKQLLYSELKNGKRNVGGQEKRFKDGLKANLKNCGIDTENWEALALERSNWRSAVTSSAAEFEEARTEGLREKRAKRKERQANPDRDRLPPGNRCPHCGRICGSRIGLFSHLRTHAQDTKVGRPSSSNYEGSPK

SEQ ID NO: 2402 - protein, 982 aa, synthetic construct
  source 1..982: note = Description of Artificial Sequence: Synthetic polypeptide
MDEYQRSLSRPLLTIMSINIEGLSLAKEELLAKMSEDISCDILCIQETHRDITMRRPKILGMQLAVERPHRQYGSAIFVRSGVAISATSLTEVNNIEILSVELDSCTVSSLYKPPGADFYFTPPTSCHNHEAHFVVGDFNSHSCVWGYDEDDRNGEAVLTWADNSRMSLLHDSKLPPSFNSGRWKRGYNPDLIFVKESISHQCTKRVLNPIPNTQHRPICCVAYAAVRPKSVPFRRRYNFNKANWTKFTETLEAAISDIEPSIENYDLFVEAVKRSSRLSIPRGCRTSYLPGLNEESLNQLQEYLRLFQENPYSDGTIAAGQKLSTALANAKKDRWIELLENLDMSKSSRKAWQLLRRLDSDPLVNPGHANVTPDQIAHQLIQNGKTNCSRIKMKINRVPELETHQLSSPLNLKELREAIKRCKTGKAPGLDDLMMEQIKHLGPKAENWLLKFYNQCLAHKQIPRAWRKTKIIAILKPGKDASNARNYRPISLLCHLYKVYERMLLNRLGPVIEPKLIAQQAGFRPGKNCTGQILHLTEHIEEGYEKGCITGTVFVDLTAAYDTVQHRKMLHKVYHITRDFDFTKTVQTLLENRSFYVEFQGQKSRWRRQKNGLPQGSVLAPTLFNIFTNDQPQPPLTKSFIYADDLGLTTQAKDFETVEKQLTNALKDLSSYYKENHLKPNPAKTQVCAFHLRNREANRKLKVTWEGQELEHCFHPKYLGVTLDRTLTYRKHCMNTKHKVAARNNILRKLTGSAWGADPQVIRTSALALSFSTAEYACPVWHKSAHAKQVDIALNETCRIITGCLKPTPVDKLYKLAGIAPPDVRREVAANGERKKVEHCESHPLHDYHPPPTRLKSRKGFMRTTTPLDVPPATARVSLWAAKPGNSNWMAPQEGLPPGANQEWATWKSLNRLRSGVGRSKDNLARWHYLEESSTLCDCGAEQTTQHMYACPQCPASCTEEELFKATDNAVAVARFWSKTI

SEQ ID NO: 2403 - protein, 972 aa, synthetic construct
  source 1..972: note = Description of Artificial Sequence: Synthetic polypeptide
MGSWNVRTLSEAGALKKLDDALATLSMDLVALQEIRWLGNGVHNRRGKHCYDIYYSCHDRHRVLGTGFAVGPRLKPAIMDFKAINDRLCTLRMRGKFFNISLINVHAPTEDKEEEEKDLFYGRLARIVDACPRHDLIIILGDFNAKVGREPMYRQYTGCHSLHEHSNDNGSRLVQFAAANNLVVGSTKFARKKIHKITWAHPGGESFNQIDHVLISRRRQSSLLNVRTYRGANIDSDHYLVGLVIRCRIARPRANGGGENTQARLNTDSLRDIAVQQEFKTALEESLLPEDRYETTSERWNALKTKIINCARNILPPRRGNTKSGWFDDECRQVTERKNTAYRAMQQRHRTRACAEEYSRLRREEKRVHRSKKHALEEQNMRELEQTREAYGPTRKFYQAIAGHRNNVVPKVTCCRNKDGDLVSNQPEVLSRWAQYFDELLNDQFSEQLEAPLADNVMLLPPSIEETRKAIRRLKNNKAPGTDGIAAELVKNGGARLENEIHQIVTEVWDSESMPCDWNLGIIYPIYKKGDRLDCNNYRGITVLNTAYKIFSLILQDRLVPHVEEIVGNYQRGFRNGKSTTDQIFTMRQILEKMAEYRNDTYHLFIDFKAAYDSIARVKLYDAMSSFGIPAKLIRLVRMTMTNVTCQVRVDGKLSGPFATTKGLRQGDGLACLLFNLALERAIRDSRVETTGTIFYKSTQILAYADDIDIIGLRLSYVAEAYQGIEQAAENLGLQINEAKTKLMVATSADLPINNPNLRRRDVQIGERTFEVVPEFTYLGSKVSNDNSMEVELRARMLAANRSFYSLKKQFTSKNLSRRTKLGLYSTYIVPVLTYASETWTLSKSDEALLAAFERKMLRRILGPVCVEGQWRSRYNDELYEMYGDLTVVQRIKLARLRWAGHVVRMETDDPARKVFLGRPQGQRRRGRPKLRWQDGVEASAIKAGITDWQTKARDRERFRTLLRQAKTAKRL

SEQ ID NO: 2404 - protein, 999 aa, synthetic construct
  source 1..999: note = Description of Artificial Sequence: Synthetic polypeptide
MNAGSESRQEAVCRKIEDLNTAKTKVIIGLWNVKTLYGTGKSAQVTAEMRRYGLHVLGISESQWTGSGWLRTATGETLIYFGREDNQHREVVATILNKGLEKCLMEWKPINSRMMTLRLKGKHTNTSIIQCYAPTNDSEDESKDYFYEELQRGLTGIPRHDLIVVMGDLNVKVGEDNTNYERTMGQHGMGTRNENGERLVDFCALNNLVIGGTLFPHRTIHNLTWNSPNGRDKNQIDHLMIGGMLRRSLQDVKVRRGADVGSYHHLVTSRIKFKLKKTFTREATRTQFNIQKLSDGNVTSAFRLELKNRFQALQDLEETTPNTDEVNTQWKLIVEAYTESSKTCLGVKKKNASNEWIQQGTWNIIEERREIRKRELAAKSIRLQEKYAEDYKEVCQKVKRLVREDKREAMENLATETEEAAAKGEQGNVYKITRIICGKYHGGMSGPIKGKIGRLLTIEKEQEARWPEHFREVLNQPPPEDTPDIQEATLNLDISSDPPQRHEVVKAVKSLKEGKSPGMDNLNAELFKVDPELTTTILQPLFKTIRKGEQITEDWRTGVIVKVPKKRALGDLNNWTGITLLSVASKILAKIIINRMSDAVDICLRKEQARLRKERRCTDQIFALRNITEQCTERQRQLYVNVVDFEKVFDGVHRESLWCILRSYGIPGKIVEVIKSFYQSFKHVVGNRTTAFEVKTGVRQGCNMSAIMFNLAIDWVMRKTTEDTSRGIRWTLFSTFEDLDLVDDLAQLSHTNQHMKEKTNPLHKYERHIGLRISQKKTEMMTLNVSSPTLIMENNAHLPITDKFTHLGSINKTDGGTKEDIMNRLGKERSVHRSVINIWKSEQFSIQTTLKQYNSCVLSTLLYGFECWRKTGHDRAKQSSFHTTSLRQILRIFWPDNISNTDLLQKWRQEDRTTIIKRRRWRLIGHVLRREPDSVVKTAFHWTPEGHRKRGRPKVTWRRKVESEMKSWNHSWGTLTKLGQNRQSWRSFVAARNSRWRNG

SEQ ID NO: 2405 - protein, 1048 aa, synthetic construct
  source 1..1048: note = Description of Artificial Sequence: Synthetic polypeptide
MKLSHARGATQDGRVMVERSDRMWSTGEGNGKPLQYSCLENPMNSMKRQNDRILKEELPRSVGAQYATGDQWRNNSRKNEGMEPKQKQYPAVDVTGDRSKVRCCKEQYCIGTWNVRSMNQGKLEVVKQEMARVNVDILGISELKWTGMGEFNSDDHYIYYCGQESLRRNGVAIMVNKRVRNAVLGCNLKNDRMISVRFQGKPFNITVIQVYAPTSNAEEAEVERFYEDLQDLLELTPKKDVLFIIGDWNAKVGSQETPGVTGKFGLGIRNEAGQRLIEFCQENALVITNTLFQQHKRRLYTWTSPDGQHRNQIDYILCSQRWRSSIQSAKTRPGADCGSDHELLIAKFRLKLKKVGKTTRPFRYDLNQIPYDYTVEVRNRFKGLDLIDRVPDELWNEVRDIVQETGIKTIPMEKKCKKAKWLSGEALQIAVKRREVKSKGEKERYKHLNAEFQRIARRDKKAFLSDQCKEIEENNRMGKTRDLFKKIRDTKGTFHAKMGSIKDRNGMDLTEAEDIKKRWQEYTEELYKKDLHDPDNHDGVITDLEPDILECEVKWALESITTNKASGGDGIPVELFQILKDDAVKVLHSICQQIWKTQQWPQDWKRSVFIPIPKKGNAKECSNYRTIALISHASKVMLKILQARLQQYVNRELPDVQAGFRKGRGTRDQIANIRWIMEKAREFQKNIYFCFIDYAKAFDCVDHNKLWKILKEMGIPDHLTCLLRNLYAGQEATVRTGHGTTDWFQIGKGVRQGCILSPCLFNLYAEYIMRNAGLEEAQAGIKIAGRNINNLRYADDTTLMAESEEELKSLLMKVKVESEKVGLKLNIQKTKIMASGPITSWEIDGETVETVSDFIFLGSKITADGDCSHEIKRRLLLGRKVMTNLDSIFKSRDITLPTKVRLVKAMVFPVVMYGCESWTVKKAERRRIDAFELWCWRRLLRVPWTARRSNQSILKEISPGISLEGMMLKLKLQYFGHLMRRVDSLEKTLMLGGIGGRRRRGRQRMRWLDGITDSMDVSLSELRELVMDREAWRAAIHGVAKSRTRLSD

SEQ ID NO: 2406 - protein, 1063 aa, synthetic construct
  source 1..1063: note = Description of Artificial Sequence: Synthetic polypeptide
MADSRNAFTVITLNVNGLNSPIKRYRFAEWIKKNEPSICCIQETHLRHRDTKKLKVKGWKKIFHASYSQKKAGVAILISDKIDFKCKDVMRDKEGHYILIKGAIQQEEITIINVYAPNQGATKYMRQTLAKLKEAIDVSTIIVGDFNTSLSPIDRSTRQKTNKEIENLNNLINELDLTDIYRTLHPKSPGYTFFSSAHGTFSRIDHMLGHKTSLNKFKKKIEIIQSTFSDHNGIQLEVNNHQRLRKFTNTWRLNNTLLNNQWVKEEIAREIAKYIETNENENTTYQNLWDAAKAVLRGKFIALNAYIKKEERAKIKELMDQLKKLENEQQTNPKPSRRKEITRIKAEINDIENKKTIERINNTKSWFFEKINKIDKPLARLTKSKREKTHINKIMNEKGDITADPEEIKKIIRGYYEQLYANKLDNVEEMDNFLETYEQPRLTREEIEDLNQPITSKEIQSVIKKLPTNKCPGPDGFTGEFYQTFQKELTPILLKLFQNIEENGTLPNSFYEANINLIPKPGKDATKKENYRPISLMNIDAKILNKILANRIQRHIKKIIHHDQVGFIPGMQGWFNIRKSINVLQHINKSKEKNQMIISIDAEKAFDKIQHPFLIKTLQKVGIEGNFLNMIKSIYEKPTASIVLNGERLKAFPLRSGTRQGCPLSPLLFNIVLEVLARAIRQDKEIKGIQIGKEEVKLSLFADDMILYLENPEKSTIQLLELINKFSKVAGYKINAHKSVMFLYARNEQTEETLKKKIPFSIATKKIKYLGINLTKDVKDLYKENYITLLKEIEGDLKRWKNIPCSWIGRLNVIKMSILPKLIYRFNAIPIKIPTTYFADLEKLVIKFIWKGKMPRIAKDTLKKKNEVGGLTLPDFEAYYKATVVKTAWYWHKDRHIDQWNRIENSEIDPQIYGRLIFDKAPKVTELGHNSLFNKWGWESWISISKRMKEDPYLTPYTKINSKWIKDLNIKDSTIKLLEDNVGKHLQDLVLGGHFLDFTPKAQATKEKIDKWELLKLRSFCTSKEFVKKVKRQPTQWEKIFGNHVSDKRLISCIYKQRNPTTQ

SEQ ID NO: 2407 - protein, 1086 aa, synthetic construct
  source 1..1086: note = Description of Artificial Sequence: Synthetic polypeptide
MTTSSWCRLGSLDASLGELRVQQLQTGLTTLFGFNVLVTFDNVHYKTSGASAPVPTSTQERLVGLTCEECGKWCKSKAGLVAHHRVHDNDSVGTNMVAQLACADCSRLFPTKIGLSQHRRHAHPTQHNADKLSRVKHSGARWSQQESQSLLRLANNLYPSCETQTALFARLEQYFPGRSAISIKTRLRVLNWQAQQDESSSGGPDQTIGQIAAYSSEADDYSVWFKQTVDCAVSLLESHADSSLASVDLLAFARGLQSGIMTPEQVLSLLDLHASRTFPHTWKTVSRRRRQLAHRMPVNRKQIRRANYAAIQTLYHQRRKDAASAVLDGSWKDLYKGNCGLPPDAEQYWKQVLSAPKHVDSRPSRVVVPSDWSLIEPITGEEVGRTVRSMGNSSPGLDKLTPRMLRRFNANVLAGYFNLLLLAGGCPPHLCRARITLVPKVPNPTSPDQLRPISVSSILVRCFHKVLADRWSRRLQLPSLQFAFLHRDGCLEATSLLHALLRHSSATASNLSLAFVDISKAFDSVSHDTIVRSAEAFGAPSPLVRYIAQSYENAVAVFPSSEVHCHRGVRQGDPLSPLLFIMAMDEVLGLSMPQLGYQFHDTLVDGFAFADDWVVCAESQARLKEKLEAAAVELGRAGMKINARKTKAMVICGDRKHRATAVSVEPFCFAEELITPLGPTDTVTYLGIPFTFKGKGVFNHRQHLLKLLDEVTRAPLKPHQRMEITRNYLIPRLTYSLVLGQVHRNTLKRLDNYIRQSIRGWLRLPKDTPISYIHAGKQHGGLGIPSLSATIPMQRRVRMEKLLSTQCRVLRNVVNDSAFGKVVRDLSLPIRVHGSCVNTKEELVAAWGDSLHNSVDGRGLRELVASPLSNRWLVFPERVFPRIFIRGIQLRCNLLRTRVRSARHGHGGQTILCRGNCGQPESLVHILQSCWITHDARCARHNRVARELAKRLRRLGYTVFEELRAPTSTSFIKPDLIAVRERRATVIDVSIVSDGRGVTVWNEKKQKYGADEFSLAIISALRAIGCDVDFLVHQPMIISYRGICFPQSAKAVIGLGLSKVTVSDLCLLAIVGSLRTYDTFMRGTWR

SEQ ID NO: 2408 - protein, 844 aa, synthetic construct
  source 1..844: note = Description of Artificial Sequence: Synthetic polypeptide
MFVLATVYRPPGHHTDFIKEFADFTSELVLAADKVLIVGDFNIHVDNEKDALGSAFIDILNSIGVRQHVSGPTHCRNHTLDLILSHGIDVDGVEIMQPSDDISDHYLVLCKLHIAKTVNSTSCYKYGRTITSTTKDCFVSNLPDVSQFLSISKTSEQLDDVTETMDSLFSSILNTVAPLRLRKVKENSLTPWCNEHTRTLKRAARKMERSWRKTKLEVFRIAWRESNLSYRKALKTAKSDYFSSLLEENKHNPRYLFNTVAKLTKNKASTSVDISQHHSSNDFMNYFTSKVDTIRDKIVTMQPSATVSHQTVHYRSPEEQFHSFSTIGEEELYKLVKSSKPTTCMLDPIPSKLLKEVLPEVIDPLLTIINSSLLLGYVPKTFKLAVIKPLIKKPQLDPKELVNYRPISNLPFLSKILEKVVSSQLYSFLEKNGICEDFQSGFRPYHSTETALLRVTNDLLLSSDRGCISLLVLLDLSAAFDTIDHTILLHRLEHFVGINGSALAWFKSYLYDRHQFVAVNEEVSYRSQVQYGVPQGSVLGPLLFTLYMLPLGDIIRKHGVSFHCYADDTQLYISSRPGETYQFEKLTECIVDIKNWMTSNFLLLNSEKTEVLIIGPKSSACNDLERCLSLDGCSVNSSSSVRNLGVLFDSNLSLESHVSSICKTAFFHLKNISKLRPMLSMSNAEMLIHAFMTSRLDYCNALLGGCSARLVNKLQLVQNAAARVLTRTRKYDHISPVLSTLHWLPIKHRIDFKILLITYKALNGLAPQYLNELLLHYSPPRPLRSQNSGNLIIPRISKSTAGGRSFSYLAPKLWNNLPNIVREADTLLQFKSRLKTHLFNLAYT

SEQ ID NO: 2409 - protein, 965 aa, synthetic construct
  source 1..965: note = Description of Artificial Sequence: Synthetic polypeptide
MCFLIPVVTNTRKTREVRCRRNPHNLRSIHVSTISQLSLSVGLWNCQSAVNKADFITSIATYSDYNLMALTETWLRPEDTATHATLSANFSFSHTPRQTGRGGGTGLLISKEWKFTLIPSLPTISSFEFHAVTIIHPFYINVVVIYRPPGKLGHFLDELDVLLSSFSNFATPLLVLGDFNIYVDKPQAADFQTLLASFDLKRAPTSATHKSGNQLDLIYTRHCFTDQTIVTPLQISDHFLLSLNIHITPEPPHTPTLVTFRRNLRSLSPNRLSTIVSDSLPPSRKLTALDSNSATNTLCSTLASCLDRLCPLASRPARASPPAPWLSDALREHRSKLRAAERIWRKTKNPAHLLTYQTLLSSFSAEVTSAKQTYYRLKINNATNPRLLFKTFSSLLYPPPPPASSTLTTDDFATFFCTKTAKISAQFAAPTTNTQDTTPTPHTLTSFSQLSESEVSKLVLSSHATTCPLDPIPSHLLQAISPAVIPTLTHIINTSLDSGLFPTTFKQARVTPLLKKPNLDHTLLENYRPVSLLPFMAKILEKVVFNQVLDFLTQNNLMDNKQSGFKKGHSTETALLSVVEDLRLAKADSKSSVLILLDLSAAFDTVNHQILLSTLESLGVAGTVIQWFRSYLSDRSFRVSWRGEVSNLQHLNTGVPQGSVLGPLLFSIYTSSLGPVIQRHGFSYHCYADDTQLYLSFHPDDPSVPARISACLLDISHWMKDHHLQLNLAKTEMLVVSANPTLHHNFSIQMDGATITASKMVKSLGVTIDDQLNFSDHISRTARSCRFALYNIRKIRPFLSEHAAQLLVQALVLSKLDYCNSLLAGLPANSIKPLQLLQNAAARVVFNEPKRAHVTPLLVRLHWLPVAARIKFKTLMFAYKVTSGLAPSYLHSLLQIYVPSRNLRSVNERRLVVPSQRGKKSLSRTLTLNLPSWWNELPNCIRTAESLAIFKKRLKTQLFSLHFTS

SEQ ID NO: 2410 - protein, 1010 aa, synthetic construct
  source 1..1010: note = Description of Artificial Sequence: Synthetic polypeptide
MNPLRNCVNARASPGSDALYGLNTVTSVQGPLHRRPGAVLNRQGFPHQGRMWAKKLVHETKIRIGTWNIGSLTGKLMELIDIMIHRKLNILCIQETKWVGEKAKEIDSLGFKLWYSGRSRTRNGVGVIIDKSLKDNVIKINRIGDRIIALKIVVDDKIVNIISAYAPQVGLDMSSKLNFWNDLEELIQNIPLEERVFIGGDLNGHVGREVDDFKSIHGGHGFGTTNEGGKTILDFCLAYDFLIANTLFKKRNEHLITYKNGYSTTQIDYFLIRKLNRLDCKDCKVIPSENLCTQHRLLVLDFKIKGHKIKNKVKQFSRIRWGHLKNINKNIFESKILDLKILSVHEDANIMWEKVASDIKNIAKDVLGVSKGKAPNSKNSWWWNPNVQEKIKNKKICYKNWFNFKNSDNWEIYKVARKDSKKAICDAKTLAFSDLYNRLDTKEGERYMYKLAKQRDRSSKDLVQVKCIKDEDQKILFLEDDIQQRWMRYFAKLFNEDCENKIDYSDLSTLNENKDFCFYRRISKTEVREALKKMKGGKAVGPDDIPIEVWKCLGDEGISWLTKLFNTILKTKKMPDEWRMSVLIPIFKNKGDAQDCANYRGIKLMCHTLKLWERVMEHRLRRDTNVSQNQFGFMPGRSTMEAIHLLRGLMEKYRENKEDLHMIFIDLEKAYDKVPREVLWRVLEKKGVNNAYIQIIKDMYAGAITCVQTQGGLTKYFPISVGLHQGSALSPYLFALVMDVLTRHLQEDVPWCMLFADDILLVDKTREGVEGKLELWRSTLESKGFRLSRSKTEYMECNFSSNRPSEGIVTLGDQVINKSTRFRYLGSIVQSDGEIDGDIISRIQVGWLKWRNASGLLCDRNVPLKLKGKFYKMVVRPAMLYGAECWPLKEKHNTKLSVAEMRMLRWMSGFTLRDRIRNEHIREKVGVAPVEDKIRESRLRWFGHIKRRPSDDPVRRVEVLDLTYVKKGRGRPKKTWLENIRNDLSLLDLNENLTFNRTQWRKRIHVADPT

SEQ ID NO: 2411 - protein, 618 aa, synthetic construct
  source 1..618: note = Description of Artificial Sequence: Synthetic polypeptide
MCIMSEISTSNNKIKTIWNIITRETGQPRTQEDSITIKVNEKITNKKSEVENTFNNYFLNVVENIGSKCSLEEARQLMEQGVPRQFDTMEIPPTSQSEIRKLINSLKSKSSHGIDGISSRVLKACSQEICRILSHICNSSLEQGIFPDRLKYAIVKPLHKKGDTLDVNNYRPISLLTALSKILEKVMYSRVASHINKNKVLTKCQFGFQKGFSTENAIYIFTNEILNALDNRKSPVGIFCDLSKAFDCVNHGILLDKLKYCGMSGKVHKWFKSYLTGRVQKVDISNSHNIQKQPSPQTGELSSMGCHRVRYWDLCCSYTKTAESSNWGTIKHGVPQGSVLGPLLFLIYINDLPFYIHKDAKLVLFADDTSIAITPESQELTDEIVNEVFQRIIRWFSVNGLSLNFEKTQYIQFHTINGITPLINIDFNQKSVAKVEYSKFLGLCIDEGLNWKKHIEDLLKRLSSATYAIRVIANFGDVQLSKLAYYAYFHSLLSYGIIFWGNSSFSKKVFIAQKRVIRIIAGAHPRSSCRHLFKDLGIFTIYIYIYSLMKFVINNPTEFKCNSSVHSYNTRRKGDLHYSRLNLALSQKGVNYSATKVFGHLPSSIKILTDSQLAFKKN

SEQ ID NO: 2412 - protein, 986 aa, synthetic construct
  source 1..986: note = Description of Artificial Sequence: Synthetic polypeptide
MMASSWVKYSGGKIVPHSDLRAGTTQEDVVIKKNKTGILRIGAWNVLTLNRVGKLENLKREMDRLKLDMVGISEVRWQDEQDFWSGEYRVINTKSVGGNAGVGLIMNKKIGMRVSYYEQHSERIIVVKIDTKPTPTTVVQVYMPTSSADDEDIEEMYEEIKEIIQKVKGDENLIVMGDWNSVVGKGREGNVVGEYGLGKRNERGDRLVEFCAEHNLMITNTWFKHHERRLYTWKRPGDTGRYQIDFIMVRNRFRNQVLNCKTYPGADIDSDHNLLVMNCRLKLKRLQKGRKVRRWNLDKLKEPEVVESFRGSIRQGLAETGESNTVEEEWVALRDRVVKAAEDHIGRRTRPNRNPWITQDILNLIDERRKYKNSASETGKREYRRLKNEIDRKCRLAKQEWLEDKCRTVEECITRGKIDTAYRKIKEIFGDKKSSCMNIKNSDGKPVLSKEGKAERWKEYIEGLYKGNKLEGSILEMEDEVEEDEIGDTILREEFDRALKDLSRNKAPGVDDIPSELLISLGEPVMKKLFHLVCKMYETGEIPSDFKKNIVIPIPKKASADKCENYRTISLISHGCKILTRIIYRRMEKLVESDLGEDQFGFRRNVGTREAILTLRLILEDRLRKGKPTFLAFVDLEKAFDNVDWNTLFQILKVAGVKYRERRVIFNLYKNQTAVIRVEGHERDAEVGKGVRQGCSLSPMLFNLYIEQAVKESKEKFGEGIKVQGEEIKTLRFADDIVILSETAKDLEEQLNGMDSVLKGRYKMNINKSKTKVMECSVRKSGDAEGIRLGNETIKVVDEFCYLGSKITSDGRSKEDIKCRMAMGRKAFLKKRNLLTSNINLNVRKSFLKAFVWSVALYGSETWTIRSSDKKMIEAFEMWCYRRMMKIRWVDHVTNEEVLNRIGEKRSFWHILTKRRDRLVGHILRHQGIVNLALEGSVWGKNRRGRPRDEYSKQIQKDVGCRTYSQMKRLAQDRVAWRAASNQSAD

SEQ ID NO: 2413 - protein, 600 aa, synthetic construct
  source 1..600: note = Description of Artificial Sequence: Synthetic polypeptide
MAGVLEAKCKSVEECIKGKSRYRLQENKRTFGTRKQLYEYQELDGKPVLSKEGKAERWKEYIEQLYKGNELRDDVVGREEEVDQDEIGDTILRDEFDRALKDLGRNKAPGVDDIPSELLKSLGEPAMTRLFELVCRMYETGEIPSDFKKNVIIPIPKKSGADRCENYRTISLISHGCKILTRIIYRRMEKLVEADLGEDQFGFRRNVGTREAILTLRLILEDRLRKGKPTFLAFVDLEKAFDNVDWNTLFQILKSAGVKYRERRVIYNLYKSQTAVIRLEGHEREASVGKGVRQGCSLSPMLFNLYMSRRPFSDVIQFVHEQAVKESKEKFGIGIKVQGEEIKTLRFADDIVILSETAKDLEEQLNGMDSVLKRAYKMNINKSKTKIMECGLRKSGDAEGIRLGNETMKVVDEFCYLGSKITCDGRSTEDIKCRMAMGRKAFLKKRNLLTSNINLSVRKSFLKAFVWSVALYGSETWTISSADRKRIEAFEMWCYRRMLKIRWVDRITNEEVLNRIGEKRNFWHTLTKRRDRLVGHILRHRGIVNLALEGSVWGKNRRGRPRDAYSKQIQVDVGCRSYEEMKRLAQDRVGWRAASNQSPD

SEQ ID NO: 2414 - protein, 744 aa, synthetic construct
  source 1..744: note = Description of Artificial Sequence: Synthetic polypeptide
MQLLVLGIDSKQIMKTAKSTYRRVVNPPKIENFRKLLKDMNWKDVYSAHGMNEKYNVFINNVSIMFENCFPLKVTRIKQKSIIKPWITQGIKISCKTKRKMYLSAKSSCNDDDLTKYKEYCKILKKVIQASKQMHYEKKIATSGNQIKTIWDIVKEETGRTRKEQEQVALRVDETLVTDGHSVANLFNKYFISVTDSMGLSGSVNNALEYLKLAFTNNFTYMNMSLTSPQEITSIIKSLKTKHSSGYDEISTKLIKACSCELSTILSYLCNQSIITGTFPDWLKYADIKPLFKKGDKEIPSNYRPISLLPAFSKILEKVMYKQLLNHLTTNDILSRTQFGFLKGSDIEKAIYTYSENVLNSLDNKLQAAGIFCDLSKAFDCVNHNILLSKLEFYGVTGNAAKWFKSYLTNRKQRVSVQVTSELSQQSSSDWEEITCGVPQGSILGPLLFLVYINDLSSVTLPEAEFVLFADDTSIAIKSTSSIVIERSANDIFMNINKWFKANSLSLNFEKTHYMQFRTCKRFPDSICIKYEEEQIEEVDSIKFLGLQLDNKFSWEEHTTELQKRLNKSVFSIRVLSDIGDIKITKLAYFAYFHSIMSYGIIFWGNSSSQSKVFRVQKRVIRIICGVNSRTSCRSLFKELGILTTASQYIYSLMKFVINNISLFPTNSSVHTYNTRNKNDLHKDLKALTLVQKGVHYSGTHIFNNLPSSIKNLATNKDQFKRNLKDFLVANSFYSISEFLNCTK

SEQ ID NO: 2415 - protein, 433 aa, synthetic construct
  source 1..433: note = Description of Artificial Sequence: Synthetic polypeptide
MQIPVAPEGVRTKEEFALVDEDWVRDQLCNLDIYKSMGPDGMHPRVLRELAEVIARPLSIIFGKSWETGEVPEDWKMANVTPVYKKGKKEDPGNYRPVSLTSVPGKVMEQLILDSISRHIKDEGVIKNSQHGFMRGKSCLTNLIAFYEEVTRWRDDGRAVDVVFLDFSKAFDTVSHSILIDKLRKCGLDDQVVRWIKNWLKGRRQRVVVNGAESSWRSVTSGVPQGSVLGPVLFNIFINDLDEGTECTLSKFADDTKLGGVADTPEGCVAIQRDLDRLESWAGRNLMKFNKGKCRVLHLGKNNPMYQYRLGVDLLERSEGERDLGVLVEGRLRELGLFSLEKRRLRGDLISVYKYVKGGCQDDGARLFSVISSDRTRGNGCKLEHRRFHVNIRKNFFTVRVTEHWNRLPRGVVESPTLEIFKARLDKFLCDVL

SEQ ID NO: 2416 - protein, 1110 aa, synthetic construct
  source 1..1110: note = Description of Artificial Sequence: Synthetic polypeptide
MDSTAHPNQGRGLEKVSQTLPALQTPGQHTAAGGSSPLSGRNQRKNTKKLLLGAWNIRTLLDRENTPRPERRTALIGKELARYNIDIAALSETRLPEEGSLSEPTTGYTFFWKGRASNEDRIHGVGLAIKTSLLKQLPDLPVGISERLMKIRLPLSKDRYATIISAYAPTLTSTEETIEQFYSDLSAVLHSVPTNDKLILLGDFNARVGQDHERWKGVLGKHGVGKMNNNGLLLLSKCSEFELTITNTVFRMANKYKTTWMHPRSKQWHLIDYIIVRRRDIQDVKITRAMRGAECWTDHRLVRATLQMRIAPRHPKRAQTVRAFYNVSRLRDPSYLQTFQSCLDDKLSAKGPLTGSSTEKWNQFRDAVKETSKAVLGPKQRNHQDWFDENNTAIEDLLSKKNKAFMEWQNNPNSAPKKDRFKSLQATAQREIRKMQDRWWEKKAEEIQRFADMKNYKQFFSALKTVYGPLKPTTTPLLSSDGDTLIKDKKGISNRWKEHFSQLLNRPSSVDQSALDQIPQNRTIEQLDVPPSIEEVQKAIKQMSAGKAPGKDGIPTEVYKALNGKALQAFHIVLTSIWEEEDMPPELRDASIVALYKNKGSRAACDNYRGISLLSTAGKILARVILNRLLSSVSEQNLPESQCGFRPDRSTIDMVFTVRQMQEKCLEQNLSLYIVFIDLTKAFDTVNRDALWVILSKLGCPAKFVKLIQLFHVDMTGEVLSGGETSDRFNISNGVKQGCVLAPVLFNLFFTQVLRHAVMDLDLGVYIKYRLDGSLFDLRRLTAKTKTTERLILEALFADDCALMAHQENHLQTIVDRFSTATKLFGLTISLSKTEVLFQPAPGRPTNQPCITIDGTQLSNVNTFKYLGSTIANDGSLDHEINARIQKASQALGRLRCKVLQHRGVSTATKLKVYNAVVLSSLLYGCETWTLYRKHMKQLEQFHQRSLRSIMRIRWQDRITNQEVLDRANSTSIEVMVLKTQLRWSGHVIRMDPQRIPRQVFYGELSAGLRKQGRPKKRFKDQLKSNLKWAGITPKQLELAASDRSSWRTHINHAATTFEDERRRRLAAARERRHQATTAPPVTTGVPCPMCHKLCASAFGLQSHMRVHRR

SEQ ID NO: 2417 - protein, 687 aa, synthetic construct
  source 1..687: note = Description of Artificial Sequence: Synthetic polypeptide
MTNRIAYGGTSKKTVKEAANKVLGKKKKPKSKPWFDEECELWFERRKKAKLDSLQNRSDRTVEEYSNVRKQTSAIYRNKKREYQKNLIRRIETNSKENNPREMYRGINAIRKGFRSRAQLMKDENGDLVTNDNELLSLWKNYFDKLLNVHENSEELGDEIHTAELHVEEPSYQEVEAAIKKLKNNKAAGNDSIPAELLKYGGVELTFKIYKLVCAIWKNETIPENWKESIIIPIFKKGDKTDCNNYRGISLLATCYKVLSNVIQARLTPFAEDIVGDYQCGFRRNRSTSDQMFTIRQLLEKKWEFCETIHQLFIDFKKAYDSIKRSKMYQILVLLGVPKKLVRLIQICLNGSTGKVRVGGNVSEPFMIRDGLKQGDGLSTVLFNLTLEYAVRKMQVSQLGATLNGTTQILGYADDLDILGDCRETVARNAEILIKAVEYTGLEVSESKTKYMIVDKLGICRGEEDLRVGNFTFEKVSEFRYLGTTINDRNEINVEINKRLHSGNACFYAVSNLLKSRLLSKNVKIRIYRTIILPVVLYGCETWALTKQADNRFRVFENKVLRKIYGPKKDEETGEWRRLHNDELHNLYASPNINRIIKSRRLGWAGHVARMGDDRTAARVMKGRPMVTRPLGRPRRRWEDNVKADLVEIGRVGVDRRGASWVGLTQDRAAWKACVDEAMNFRVPNAT

SEQ ID NO: 2418 - protein, 866 aa, synthetic construct
  source 1..866: note = Description of Artificial Sequence: Synthetic polypeptide
MTIKLVVGECTLNVVSAYAPQVGLDEEIKRRFWEGLDDIVRSIPPSERLFIGGDFNGHIGSSAGGYTEVHGGFGFGERNGGGTSLLDFAKAFDLVIANSSFPKREEHLVTYQSSVAKTQIDYLLLRRCDRRLCEDCKVIPGETLATQHRLLVMDIGIMIRRKKRSVRGRPRIRWGALTKDKAQELEGRLSAMGAWRSSGDANTMWSTTADCIRKAAREVLGISSGRTGGHKGDWWWNAVVQGKVEAKKAAYLRLVGSTGEEEKRANSERYKVARKEAKMAVTEAKTAAFARLYEELGNKGGEKKLFRLAKVRERTARDLDQVRCIKDDDDKVLMGDDQIKRRWQTYFHKLLNEEGDQDIVLGELRNADSPHELSYCRDIEVDEVMEAMRKMRRGRATGPDEIPVELWRCVGRAGLEWLTGLFNVIFKTNRMPEEWRWSTMVPLYKNKGDIQSCNNYRGIKLLSHTMKVWERVVEMRVRRTVSISDNQFGFMPGRSTTEAIHLIRRMVEQYRDKKKDLHMVFIDLEKAYDRVPREVLWSCLEVKGVPVAYIRVIKDMYDGAKTRVRTVGGDSEHFPVVTGLHQGSAFSPFLFALVMDAITHHIQGEVPWCMLFADDIVLIDETRGGVNERLEVWRHALESKGFRLSRTKTEYLECKFGAEPTEAGVEVRLDSQVIPKRGSFKYLGSVIQGTGEIDEDVTHRIGVGWMKWRLATGVLCDKKVPPLLKGKFYRAVVRPAMLYGTECWPVKNSHIQKMKVAEMRMLRWMCGHTRMDKIRNEDIREKVGVAPMEDKMREARLRWFGHIQRRSTDAPVRRCERLAVVGTRRGRGRPKKYWGEVIRQDMARLRITEDMALDRELWRSSIKVVG

SEQ ID NO: 2419 - protein, 1067 aa, synthetic construct
  source 1..1067: note = Description of Artificial Sequence: Synthetic polypeptide
MPLVFQMPAGLHMVHRFQWSFQTKTDSEEGRGHPLLKELARENLMNSSETLSDTLLENFMNSPETLSDTVPEDEPLRLEGTQNMTGKELPHQSRTNLNDMDKVKLSGPPFADVARLKLRRNSCKHPLIIGTWNVRSMNLGKLEVVKNEMECIKIDILGISELKWTGFGHFESDNHMIYYAGNDKLKRNGVAFIITKNVSRSVLKYNAVSDRIISICLQGRPVNTTIIQIYAPTTKAKDEEIEDFYQLLQSEIDQTCNQDVLIITGDWNAKVGNKEESPVVGKFGLGDRNNAGDHMIEFCKTNDLFIANTFFQQHKWWLYTWTSPDGVHRNQIDYICGKRRWKSSISSAKTRPGADCGTDHQLLICKFKLKLKTIKTSPREPKYDLEYIPPEFRDHLKNRFDALNTNDQKPEELWDDIKNIIHEESKRSLKRQERKKRPKWMSEETLKLALEWRVAKANGRNDKIKELNRRFQRAAREDKANYYNEMCKDLELENQKGRTCSAFLKLKELRKKFKPQVAILKDSMGKILNDAGNIKRRWKEYTESLYQKELVDVHPFQEVAYDQEPMVLKEEVEAALKELAKNKAPGIDGIPIEMFQQMDAPLEALTQLCQEIWKTATWPTDWKRSIFVPIPKKGDPTECGNYQTISLISHASKILLKIIQKWLQQYIDRELPEMQAGFRRGCGTRDIIADVRWILAQSKEYQKDVYLCFIDYAKAFDCVDHNKLWITLRRMGIPEHLIVLMRNLYIDQEAVIQTEQGDTAWFKIKKGVCQGCILSPYLFNLYAEQIIREAGLYEEEHGIRIGGRLINNLRYADDTTLLAESEDDLKHLLMKIEDYSLQYGLHLNIKKTKILTTGPISSITINGEKIEVVKDFILLGSTINTNGSSSQDIRRCIALGKSAAKDLFQVLKSKDVSLKTKVCLTQAMVFSIASYACESWTMNKEDRRRVDAFELWCWRRMLKVPWTAKRTNKSVLEEVQPECSLEARMARLHLTYFGHVVRRDHSLEKDVMLGKVEGQRKRGRPSTRWIDTVAATMGSSIARIVRLAQDQAVFHSAVHRVAMSQRRLDGT

SEQ ID NO: 2420 - protein, 997 aa, synthetic construct
  source 1..997: note = Description of Artificial Sequence: Synthetic polypeptide
MRIIHNTLDIPDRSRPGLTTTATDAVNLQGVGGNLTTVGRRKRGGRRVRGQREKGKGRNIGLRIGTLNVGTMTGKGRELADMMERRKVDVLCVQETRWKGSKARSIGGGYKLFYHGVDRKRNGVGVILKGEFVNSVLEVKRVSDRMMSLKLEIEGVMVNVVSGYAPQVGCELEVKERFWSELDEVIESIPRGERVVIGADFNGHVGEGNRGDEEVMGRFGVKERNLEGQMVVDFAKRMEMAVVNTYFQKREEHRVTYRSGGRSTQVDYILCRRGHLREVNDCKVVVGESVARQHRMVVCKMTLEVRKKKRGKTEKKTKWWKLQNEETCEEFRQKLRQVLGGQDELPDDWETTAEIIRETGRKVLGVSSGKRKDGKDTWWWNEEVQECVQRKRLAKRKWDVERTEEGRQEYKEAQRRVKREVAKAKQKAYDELYDRLDTKEGEKDLYRLARQRDRDGKDVQQIRVIKDRDGKVLTTQESVQKRWKEYFEELMNEENDRERREEDVVVVEQEVAEIGKDEVRKALKRMKSGKAVGPDDVPVEVWKCLGETAVEFLTSLFNRILESEKMPEEWRRSVLVPIFKNKGDTQNCSNYRGIKLMSHTMKLWERVVEARLRKKVEICEQQYGFMPRKSTTDAIFALRMLMEKYRDGQKELHCVFVDLEKAYDRVPREELWYCMRSSGVAEKYVRVVQDMYERSMTVVRCAVGQTEEFKVEVGLHQGSALSPFLFAMLMDRLTDEVRQESPWTMMFADDIVICSESREQVEEQLERWRFALERRGMKVSRSKTEYMCLNERDQGRSVRLQGAEVKKVQEFKYLGSTVQCDGECGKEVKRRVQAGWSGWRKVSGVLCDRRVPARLKGKVYKTVVRPALLYGLETVAVRQRQEAEMEVAEMKMLRFSLGVTRLDRIRNEYIRGTAHVACVSDKVREARLRWFGHVQRRDSGYIGRRMLEMELPGRRARGRPKRRYMDVLTEDMKLANVRVEDVHDRVRWKRMIRCGDP

SEQ ID NO: 2421 - protein, 1058 aa, synthetic construct
  source 1..1058: note = Description of Artificial Sequence: Synthetic polypeptide
MKRNNEDPITSPGLASPGPHSGARPRVGARRRAPGGRGSSHGPRSGTARRSDVGPLSHGPTTRRRPQKGPVQCGLGGSRGRVPRRPKPRSWNLAFGTWNVTSLGGKEPELVREVERYRLDIVGLTSTHSLGSETQSLERGWTLYHSGVAQGERRRAGVGLLVSPQLSRQVLEFTPVDERVMSLRLRVGDRSLTVVSAYGPNSSSEYQAFLVSLEGVLESAPTGDSIVFLGDFNAHVGNDSGTWRGVIGRNAPPDLNPSGVLLLDFCARHSLSITNTMFEHKGVHQYTWHQDTLGRRSMIDFVVVSGDLRPCVLDTRVKRGAELSTDHYLVVSWIRWRGRRPERLGRPKRTVRVCWERLAEPSVREVFNSHIRENFKQVPREVGDIESEWTMFSTSIVSAAARSCGRKVSGACRGGNPRTRWWTPEVRDAVKLKKESYQAWLACGTPEAADRYRQSKRAAARTVAEAKTRSWEEFGEAMEKDYRLASKKFWQTIRRLRRGKQFSTGTVFSAGGELLTSTGDIVGRWKEYFEDLLNPTDTPSFEEAESEDFGVGLSITRAEVTEVVNELLGGKAPGVDEVRPEHLKSLDAVGVSWLTRLCSIAWRSGTVPLDWQTGVVVPLFKKGDRRVCSNHRGITLLSLPGKVYARVLERRVRPIVEPRIQEQQCGFRPGRGTVDQLYTLSRVLEGLWEFAHPVHMCFVDLEKAFDRVPRGILWGVLWEYGVRGALLRAVRSLYDRSRSLVRIAGSKSDLFPVHVGLRQGCPLSPVLFIVFMDRISRRSQGPEGIWFGDHRISSLLFADDVVLLASSNRDLQRALGRFAAECEAAGMRVSTAKSEAMVLDRRKVVCHLSVGGVSLPQVEEFKYLGVLFTSEGRSEREIDRRIGAASVVMRSLYRSVVVKRELSRKAKLSIYRSIYVPVLTYGHELWVMTERTRSRIQAAEMSFLRRVAGRSLRDRVRSSVTRGELGVEPLLLHIERSQLRWLGHLVRMPPGRLPGEVFRACPTGRRPRGRPRTRWRDYVSRLAWERLGVPPEELEEVAGVREVWASLLSLLPPRPGPG

SEQ ID NO: 2422 - protein, 878 aa, synthetic construct
  source 1..878: note = Description of Artificial Sequence: Synthetic polypeptide
MFFFSIRGGKKGGGTASIAHKTILSENILLSKYCSFEHHAFLFGDPPVLTVTVYRPPTPPSCFIEEFSEFLSSLHIRYNRILITGDFNLHVDKNDDIYACEFLNLLNSMDFQQHVTQPTHNRGHTLDLVITYGLSTGVSSVVDLAISDHYCVFFNVTSEIQQEASVRTVRKRYLTPEVAASFIDIFKQTPAQILPAPCDFIVDHFNNRLQSSIDAVAPFKTKTLRTTPKMPWKTDDIKGLKQNCRRAERRYRKTKLIIHKDILKEQLKIYNNSVKRARTSYFSKIISENKNNPKFLFKTIDILINKDFNKSSMPSSNAACEDFADHFMGKINAIRSNISSMQYTDLNRPPALFLPEETLGSFVLVDAEMLGRVVSQVNTTTCLLDPIPTSLFKTFYGFFESELLNIVNCSLQTGVFPSACKTAVVRPLLKKSQLDPKNLDNYRPVSNLPFLSKINIEKSVATQLHEFLNAQKILEKYQSGFRKNHSTETALLKIVNDLRLNYDSQKLSVLVLLDLSAAFDTVDHQILLDRLRSLVGLSGNVLKWFYSYLTDRHFYVSMDTCSSGIHEISCGVPQGSILGPILFNLYMLPLGEVIRRHGVDFHSYADDTQLYIAVSPDDLEPVNTLLNCILDIKSWMAENFLQLNQDKTEVLIIGSEDKREMILPHLHNFKPSQCVRNLGVLFDSELNFIPHIKNVVKTGFYHLKNIARVRPFLSLASTEVLMHAFIFSRLDYCNALLSGLPKKSISNLQLLQNSAARVLTRTRGREHITPVLKSLHWLPVRFRIDFKILLMVYKCFYGLGPSYLNDILLKYEPSRTLRSSGAGLLVVPKVRTKTYGEASFCHYGPRLWNGLPENLRAAETVEVFKKRLKTHLFNLAFS

SEQ ID NO: 2423 - protein, 844 aa, synthetic construct
  source 1..844: note = Description of Artificial Sequence: Synthetic polypeptide
MSSFEYVSFKIELKQTPPLLCIVMYKPPQHSQSFIDDFTEMLSVVCTDFDGLVITGDFNVHVDNVNDRNAKELNAVLETFDLIQHVSCPTHSRGHTLDLLITKGVNIYNVSVVDVALSDHFCVFFDLSVAPKPPPGPAVVQRRQINESTRAQFVEMINPENASGANVDEMLNSVTSSILNVLDAIAPMKVKLRKHRQKAPWRNDDLVRAQKQQCRRAERKWRKSKLQVHYGMYKGELYAYNQILCRTRERYFSEIIGSCSSNSRVLFTTVNRLTNPPTQLPIELVCTPKCNEFAVFFNDKVQGIKKAINSTTHITIERPPTHSKLTHFVPVTDQTVQETITRLSSSTCCLDVLPTRFLKSVLNSVLPSITQIVNMSLQSGIFPEALKTAVIKPLLKKSGLDPTVLNNYRPISNLPFLGKVLEKVVYQQLTDFLLLNNSFDVFQSGFRPHHSTETALIKVTNDIRLNTDDGKVSVLILLDLSAAFDTVDHGILLHRLQDWVGISGSALSWLKSYLEDRKYFVEIGSCVSDYMALTCGVPQGSILGPLLFNLYMLPLGQLIRSNNISYHNYADDTQIYVSLTTGEYGPVDSLSHCLQQISAWMQNNFLQLNSNKTEVIIFGPQKQREIVSSYLHSLSLKPSNQVRNLGVIMDSDLNFNSHIKSVTSAAFYHLKNIAKIKNIVSKPDLEILIHAFVSSRLDYCNGLLTGLSKRAVKQLQYIQNAAARVLTRTRKYDHISPVLRSLHWLPVPQRIDFKAALLVYKSLHGRAPKYISDMLVPYEPSRTLRTSGAGLLLIPRVRTKQGESAFQYSAAKIWNSLPEVVRQASSVFMFKSRLKTFLFSRVYD

SEQ ID NO: 2424 - protein, 979 aa, synthetic construct
  source 1..979: note = Description of Artificial Sequence: Synthetic polypeptide
MLYTIFLVYGILCFFFVYFCIYLYITVYLCFLFFLFLLLCGDVESNPGPGRARGCRLLYCNIRGLHANLAELDFVSRGVDVVCCSETLVAGRRHDAELALAGFQSPFRRLCGSGPGFRGMAVYVRSGFCAYRQSVHECACHEIIVVRVCGRLNNYYLFSLYRSPATDDSLYDCLLTAMASIQSTDPKAAFVFVGDVNAHHRDWLGSASPTDCHGVAALDFCTLSSCVQLVRGSTHIAGNCLDLVMTDVPDLMTVTVGSPIGSSDHSHLVVSLDLNQVVPVVDTRRVVFVKSRANWVAITRAVRTLPWRQIIHSEDPVSELNDLTVSILERFVPKRTILVRSRDKPWFDDQCRLAFEAKQAAYRAWRRSRDRTLWQTYVDRRAEAKRVYEEAQRRLRQRSRESLLSIDHPHRWWSELKGSVFGAEPSLPPLVGPGGGIITDPLARAELLSAHFDGKQSRDVIALPHGCHPEPRLTSLAFRSGAIKVLLEGLDPYGGVDPVGMFPLFYKQLADVLAPKLAVIFRRLIRLGNFPRCWRTGNITPIPKGPVSPYVANYRPITLTPILSKVFEKLIAGKLGRFAEVTGLLPAGQFAYRIGLGCCDALLSVSHHLQSALDCRSEARLVQLDFSAAFDRVNHRGLLYKLESFGVGGRVLSIIRDFVSERTQSVSVDGVLSASVGVVSGVPQGSVLGPLLFVLYTSDMFSSLENTLINYADDSTLMAVIPAPRLRDAVAQSLNRDLSRISAWCSAWSMKLNASKTKSMIISRSRTLVPQHPQLEIDDTLLQESSSLEILGVVFDEKLTFEPHIRRLVSRASTKIGLLRKVNSVFGDSQVARRCFYAFLLPVLEYCSPVWASAADTHLRLLDRLVSSASRLCADNDLVNLSHRRRVAELCMFYKVYNNERHWLYSSLPALKVFGRETRAACGAHSFTLEAVRCRTNQFCRCFVPWSAKVWNLLPASAFGRIGLQAFKSAVNGFLLDFL

SEQ ID NO: 2425 - protein, 1015 aa, synthetic construct
  source 1..1015: note = Description of Artificial Sequence: Synthetic polypeptide
METGGGYTFFWRGRSSDERRESGVGFAVKNHLVRKLASLPKGVNDRLMTLHLPLPRGKQATLISAYAPTMTNPDEVKDKFYEDLDALLSSVKRTDRLILLGDFNARVGSDHTAWDGVIGKNGIGKCNSNGLLLLKTCAAHDLIITNTIFRLPTRKKTSWMHPRSKHWHLIDYVIVRRKDRQDVRVTKAMPSADCWTDHRLIISKLSFRIKPKRRPQGNKAVMKKINVSRLRNPNTATLLAEDLGNQLLELQLEENAEKDWERFRDIVHSSALKVLGPSHRKQQDWFDENDEEIKAILAEKHRLHRAHQNDPSSTAKKNAFNNIRRIVQNKLRKMQDSWLSAKADEIQKFSDRNDAKRFYEALRSLYGPQPSGSSPLLDSDGATLITEKALILQRWAEHFQSVLNRPSSINNEAIDRMPQADINHSLDVSPSETETLQAISQLSSGKAPGSDAIPAEVYKGGGAVLVNKLTQLFQSFWNQGSIPQELKDASIVHLYKRKGNRQVCDNHRGISLLSIAGKILARVLLNRLINHLEQGLLPETQCGFRKERGTVDMIFAARQLQEKCQEQNRELYTTFVDLTKAFDTVSREGLWRIMSKFGCPDRFILMVRQFHDGMTARVLDDGEASEAFPVTNGVKQGCVLAPTLFSIMFSAMLSDAFQNSSLGIRLRYRTDGKLFNLRRLQAVTKIKETVLRDLLFADDCALNAGSEQEMQASMDKFAAACDNFGLLINTKKTEVMHQPAPKAQHQVPTITVKGQKLQAVDQFTYLGSTLSRSVTIDIEVNCRVAKASSAFGRLLTKVWDRRGISLATKLKVYRAVVLTTLMYASETWTVYRRHARQLNHFHTICLRRLLRIRWQDKVPDTEVLSRAGLPSVYTLLMKAQTRWAGHVARMPDHRIPKQLFYGELFQGKRSHGGQKKRYKDTLKASLKSLDIDTTSWETLAQDRSTWHTLIYQGCQTSEARRTTIAQEKRALRKARVAKAATVVPTHVCPTCGRTFRARIGLISHLRTHHEQSITC

SEQ ID NO: 2426 - protein, 748 aa, synthetic construct
  source 1..748: note = Description of Artificial Sequence: Synthetic polypeptide
MKLISSLAFLKRCRDSKVIPNAVKITHHIKSSKANQILHKASELLLIERIQHNRSELSYISESLKQLHLDISNSVSMHYWNIIDNITQQSADNVFKLTKTNQINKFSRLHNKQIPTENQKCKNKTVLNLTNTVLTGDMVSILSKGLNFAVTPRTIPVDEIIAEVESAVRLLPHNEAEMTRHEVAKIIENSKVPKVNISSNEAKALRELRVNKDIQILAADKGRTTVVMSRADYDNKIRNLLEESTYIKIKRDPTNTLERKTTAIIANSLIPKNEQYLIKPRASKPPRLYGLPKIHKIGIPLRPIVSTIGSATYQLAKYITKQIQPYIGKTSSFIKNSEHLVNVIKDIKLTPDDILVSFDVISLFTKVPVDESLKLLDTLVKNTGLQKDIPKLAGHCLNNTYFLWRGDFFKQKEGAAMGSPLSPAIANLYMENFEIRALASSTLKPSFWFRYVDDTLVVWPHGKDTLNDFLNHLNAQNPAIQFTMEMEVNNTLPFLDILLGHGLNGKITHSVYRKQTHTDAYLNAESHHHPAQKSSLIKTLVHRAKTVSDGESLVREIKHVKDALRQNGYNNAQINRALNAKSRSQSNTTESDQIVKTIKIPYISGVTDKLARVLQKQNITVRFGTVHKIQKLVSCTKDALPKLSTEGVYRINCSCGSCYIGQTGRNISVRLKEHQRNIKLSQTQLSAVAEHACQQGHSIDFDNVAVVCKTNYYWQRLIRESIEIERNKNNFNRSDSYRLSAAWKRIIK

SEQ ID NO: 2427 - protein, 593 aa, synthetic construct
  source 1..593: note = Description of Artificial Sequence: Synthetic polypeptide
MVDEIIAEVESAVRLLPHNEAEMTRHEVAKIIENSKVPKVNISSNEAKALRELRVNKDIQILAADKGRTTVVMSRADYDNKIRNLLEESTYIKIKRDPTNTLERKTTAIIANSLIPKNEQYLIKPRASKPPRLYGLPKIHKIGIPLRPIVSTIGSATYQLAKYITKQIQPYIGKTSSFIKNSEHLVNVIKDIKLTPDDILVSFDVISLFTKVPVDESLKLLDTLVKNTGLQKDIPKLAGHCLNNTYFLWRGDFFKQKEGAAMGSPLSPAIANLYMENFEIRALASSTLKPSFWFRYVDDTLVVWPHGKDTLNDFLNHLNAQNPAIQFTMEMEVNNTLPFLDILLGHGLNGKITHSVYRKQTHTDAYLNAESHHHPAQKSSLIKTLVHRAKTVSDGESLVREIKHVKDALRQNGYNNAQINRALNAKSRSQSNTTESDQIVKTIKIPYISGVTDKLARVLQKQNITVRFGTVHKIQKLVSCTKDALPKLSTEGVYRINCSCGSCYIGQTGRNISVRLKEHQRNIKLSQTQLSAVAEHACQQGHSIDFDNVAVVCKTNYYWQRLIRESIEIERNKNNFNRSDSYRLSAAWKRIIK

SEQ ID NO: 2428 - protein, 977 aa, synthetic construct
  source 1..977: note = Description of Artificial Sequence: Synthetic polypeptide
MALMMVASAGRCALFCLVLSVNSVFCQDFRSSLTRDELLNIRETTPVDLIPTFLLPAAELVGILVNAALGFAQATKRRPRGKRSGALVRLRRRGIRTVLPSFFLSNVRSLYNKMDELQLLMVKNKDFLSASALCFTETWLCDLIPDTSLQLAGFHLVRSDRDIALSGKTKGGGICFYINSGWCVDVTVILQHCSPLLESIFITCKPFYSPREFASLILVGVYLPPCPQVKEAQRMLADQILSVERANPDSLVIVLGDFNKGNLSHELPKYIQFIKCPTREGNTLDHCYTTVSRAYHAVPRAALGHSDHAMVHLIPAYRQKLKLCKPAVRTSKQWTSEAVEDLRACLDCTDWDMFTTATNSLDELTEAVTSYISFCEDCCIPTRTRVNFNNNKPWFSAKLRRLRLEKEEAFRSGDRDRFKESKNRFSKAVREAKRLYSERLKHQFSTNDAASVWRGLRQITNYKPRAPHTTNDSRLANDLNEFYCRFERQLDCPEPPLPTQEAPSPTNTTETTISFQEGEVNRLFKRQNPRKAAGPDSVSPATLRHCADQLSPVFTNIFNTSLETCHVPACLKSSTIIPVPKKLRPTGLNDYRPVALTSVVMKSFERLVLAHLKAITDPLLDPLQFAYRANRSVDDAVNMALHFTLQHLDAPASYARILFVDFSSAFNTIIPALLQDKLFQLNVPYTTCKWITDFLSDRKQCVKLGTQVSGSRSISTGTPQGCVLSPLLFSLYTNSCTSNHLSVKLLKFADDTTLIGLISGGDESDYRWEADNLVTWCSQNNLELNALKTVEMVVDFRKNTAPLTPITLLDSPVKIVESFRFLGTILSRDLKWELNISSLTKKAQQRMYFLRQLKKFNLPKTMMVQFYTAIIESILTSSITVWYAAATAKDKSRLQRIIHTAEKVIACNLPTLEDLHTTRSMRRARKIMADFSHPGHSLFQLLPSGRRLRSIRTKTSRHKNSFFPSAAGLLNKAKGLH

SEQ ID NO: 2429 - protein, 837 aa, synthetic construct
  source 1..837: note = Description of Artificial Sequence: Synthetic polypeptide
MNSSQTLSDMVPESEPPRLEGTQKTTGEELPPQSRVNLNDVDGVRPLGSSFADVARLKMRRNSCKHPLIIGTWNVRSMNLGKLEIVKNEMECINIDILGISELKWTGLGHFESDNHIVYYAGNENLKRNGVAFIIKKNISRSVLKYNAVSDRIISIHLQGRPVNTTIIQIYAPTTKAKDEEVEDFYQLLQSEIDQTCNQDALIITGDWNAKVGNKEGSVVGKYGLGDRNNAGDHMIEFCKTNDFFIANTFFNQHKWRLYTWTSPDGIHRNQIDYICGKRRWKSSISAVRTRPGADCGTDHQLLICKFKLKLKKIRTSPREPKYDLEYIPPEFKDHLKNRFDVLITNDRRPDELWNDIKDIIHEESKRSLKRQERKKRPNWMSEETLKLALECRAAKAKGRNGEVKDLNRRFQRAAREDKRKYYNDMCKELEMENQKGRTHSAFLKLKELKKKFKPRVAIVKDSTGKLLNDSESIKRRWKEYTESLYQKELVDVQPFEEVAYDQEPMVLKEEVEAALKALAKNKAPGIDGISIEIFQQTDAALEVLTHLCQEIWRTATWPTDWKRSIFMPIPKKGDPTECGNYRTISLISHASKILLKIIQKRLQQYIDKELPEIQAGFRRGHGTRDIIADVRWILAESKEYQQDVYLCFIDYAKAFDCVDHTKLWLTLQRMGIPEHLIVLLRNLYMDQEAVVRTEQGDTAWFKVRKGVHQGCILSPYLFNLYAEQIIREAGLYEEEQGIRIGGRLINNLCYADDTTLLAGNEEDLRHLLMKIKDHSLQYGLHLNIRKTKILTTGPVSNIVINGERIEVVKDFILLGSTINALGSSSQEIKRHIALGK

SEQ ID NO: 2430 - protein, 1103 aa, synthetic construct
  source 1..1103: note = Description of Artificial Sequence: Synthetic polypeptide
MITRLSMPLLNVNMPCPLLFWLVFIGLFHCRASSPAHYTLSNLSVPPPTHAMTSPGFNDVSRDNISLIITQCLGLPPLYSHPTIPLSVHYTLNLFYRPQKPAPFTLCSGRARRPILIAFSRTLILLLLCSSGDVEVNPGPAVPSSTPTPQALSFDDFCNRKSLGFMHVNIRSLLPKFVLFTALAHSANPDVLAVSESWLRKTTKNSEISIPNYNIFRQDRTAKGGGVAIYCRDSLQSSVLLSRSVPKQFELLLLKIHLSKNKSLTVAACYRPPSAPSCALDTICELIAPHLSSELVLLGDLNWDMLNTPAILQSKLDALNLTQIINEPTRYNPKAVNTGTLIDIILTNLPSKYTSAVFNQDLSDHCLIACIRNGSAVKRPPLITVKRSLKHFSEQAFLIDLALVSWKDIDLIPSVEDAWLFFKSAFLTILNKHAPFKKFRTRNRYSPWFSPDLTALNQHKNILWRSALASNSPRDMQLFREVRNQYTQAVRKAKASFFKQKFASCNTNSKKFWDTVKSMENKSTSSQLPTALRIGNSVTTDKSTIIENFNKHFSTAGHAFHLATPTPVNSTAPPTATRPSLPHFSFSQIQSADVLKELQNLDPYKSAGLDNLDPFFLKLSAEIVATPITSLFNLSFVSSEIPKDWKAAAVIPLFKGGDTLDPNCYRPISILPCLSKVFESQVNKQITDHFESHRTFSAMQSGFRAGHGCTSATLKVLNDIITAIDKKQYCAAVFIDLAKAFDSVNHHILIGRLNSLGFSNDCLAWFTNYFSDRVQCVKSEGLLSGPLAVSMGVPQGSILGPTLFSVYINDVALAAGESLIHLYADDTILYTSGPSLDTVLTNLQTSFNAIQLSFRGLQLLLNTSKTKCMLFNRSLPAPARPSSITTLDGSDLEYVDNYKYLGVWLDCKLSFQTHIKHLQSKVKSRIGFLFRNKASFTHAAKHTLVKLTILPILDFGDVIYKIASNTLLNKLDAVYHSAIRFVTKAPYTTHHCDLYALVGWPSLHTRRQTHWLQVIYKTLLGKVPPYLSSLVTIAAPTCSTRSSRYISLVTPKANSSFGRLSFQFSAANDWNELQKSLKLETLISLTSFKHQLSEQLTDHCTCT

SEQ ID NO: 2431 - protein, 982 aa, synthetic construct
  source 1..982: note = Description of Artificial Sequence: Synthetic polypeptide
MAASLRVPRKLCSILFFYVLFLTLLPQVILGFITYSREELLDIRATSTHQHYDQEYDFPEADPLFGPPPRTMDRIPAGDPKQRRRRRRGRRSGLLVRLRRRAHRAPLPSILLANVQSLDNKVDEIRARVAFQRDIRDCNVLCFTETWLTRDTLSESVQPPGFFTHRADRNKHLSGKKKGGGVCLMINETWCDHNNIQELKSFCSPDLEFLTIKCRPHYLPREFSSIIITVVYIPPQADTSTALKELHWTLCKLETTYPEAAFIVAGDFNKANLKTRLPKFYQHIDCATRAGKTLDHCYSNFRDAYKALPRPPFGKADHDSILLLPAYRQKLKQEAPALRSVQRWSDQSDSTLQDCFDHVDWDMFRIAANNNIDEYADSVCEFINKCIGDVVPTASIKTFPNQKPWIDGSIRAKLNARTTAFNQGKVTGNMTEYKQCSYSLRKAIKQAKRQYRDKVESQFNGSDTRGMWQGLQSITDYKRKTSPVADHDALLPDRLNNFFARFEDNTVPLTRPATKTCGLSFTAANVSKTFKRVNPRKAAGPDGIPGRVLRACADQLAGVFTDIFNQSLSQSAVPTCFKRATIVPVPKKAKVTELNDYRPVALTSVIMKCFERLVKDHITSTLPDTLDPLQFAYRPNRSTDDAIAITLHTALTHLDKRNTYVRMLFIDYSSAFNTIVPSKLVIKLETLGLDPALCNWVLDFLTGRPQVVRVGNNISTPLILNTGSPQGCVLSPLLYSLFTHDCVAMHASNSIIKFADDTTVVGLITNNDETAYREEVRALGVWCQENNLTLNVNKTKEMIVDFRKQQREQPPIYIDGTVVERVESFKFLGVHITDKLKWSTHTDSVVKKAQQRLFNLRRLKKFGLSPKTLTNFYRCTIESILSGCITAWYGSCSAHNRKALQRVVRSAQRITGCKLPALQDTYTTRCHRKAKKIIKDNNHPSHCLFTPLSSRRRGQYRCIKAGTERLKNSFYLKAIRLLNSHH

SEQ ID NO: 2432 - protein, 1131 aa, synthetic construct
  source 1..1131: note = Description of Artificial Sequence: Synthetic polypeptide
MCSFAQYISPPQNPHITQRRSSPPRIPILLRGDISPPQNPHITQRRYPPLRIPILLRGDIPPSESPYYSEEIFPTLEEETCHFQAQGNVLICGDTNARTGTLPDLTSTRGDSFITGHTVSNCLHLPHRNNSDSTVNKNGRDLLQLCRSLGLYFVNGRLRGDSLGRFTYCSPLGHSTVDYMITDIDPFSLSSFTVKPLTPLSDHSQITLFLKRTDMETTTHSQPSKLYNIRNSYRWAQNSTEEYQKATWNQNIQTLLDNFLDTTFTHSKEGINLAVKNINYIFRQTAKEAQLKLIKNKTKKITDDNWFDADCKIIRKKLRTLSNQKHRDPNNGELRLHYCETLKLYKRTLRTKKAQYNSKQLTLIEESINTNNFWQNWKKLKKSKQEELAIQNGDIWTTHFKTLYNTVQIDTNAEQRQIHEKLNGLEKAIKDNQNPLDSPITDQELYKKLQALKFKKACGPDGILNEMLKLTSAKFQLAILKLFNLILSVGYFPDIWNQGLITPIFKNGDKFDPNNYRGICVNSNLGKVFCSIINVLSKSQIGFIPKHRTTDHIYTLHTLIDKHVHQNNTKIYACFIDFQKAFDSIWHTGLFYKVIESGVGGKTYDIIKSMYTGNTCSIKIGKKRTEFFNQGRGLRQGCNLSPALFNIYINELATILEKSSAPGVSLHNSEVKCLLFADDLCLLSPTAHGLQQSLDLLEQYCQTWALAVNPKNTCPREDPGPVRPVLQDLCLLSPTAHGLQQSLDLLEQYCQTWALAVNPKKTKIMIFQRRSRSQGIRPKFSIGTKYIEYCTHYNYLGLKISSTGHLNEAVNELREKARRAFYAIKKQIQIEIPIKIWLKLIEYVIEPIALYGSEVWGPLAKQDFIKWDKHPIETLHAEFCKILLHVQRKTTNNACRAELGQYPLIIKTQKRAIKFWKHLKYSDPLSYHYQALQCQELSKEKSPLIQLVLGLSSQTCSTNTLKPQDQNIQSIRINQITTQSKQNYIAYWETQAQTQSKMQCYLALNRQYTVANYLTMVTDQNLRKTLTKYRLSEHSLAIEKGRHRKTWLPVEERLCNHCTTAEPETELHFLTKCQKYKTIRECHFPKFETLIQGFKDLSDEDRLPVLLGEDAESCGLAAHYIAACHKMRDSV

SEQ ID NO: 2433 - protein, 1102 aa, synthetic construct
  source 1..1102: note = Description of Artificial Sequence: Synthetic polypeptide
MITRLSMPLLNVNMPCPLLFWLVFIGLFHCRASSPAHYTLSNHLVPPPTHAMTSPGLNVSRDNISLIITQCLGLPPLYSHPTIPLSVHYTLKLFYRPQKPAPFTLCSGRHRRPILIAFSRTLILLLLCSSGDVEVNPGPAVPSSTPTPQALSFVDFCNRKSLGFMHVNIRSLLPKFVLFTALAHSANPDVLAVSESWLRKTTKNSEISIPNYNIFRQDRTAKGGGVAIYCRDSLQSSVLLSRSVPKQFELLLLKIHLSKNKSLTVAACYRPPSAPSCALDTICELIAPHLSSELVLLGDLNWDMLNTPAILQSKLDALNLTQIINEPTRYNPKSVNTGTLIDIILTNLPSKYTSAVFNQDLSDHCLIACIRNGSAVKRPPLITVKRSLKHFSEQAFLIDLAGVSWKDIDLIPSVEDAWLFFKSAFLTILNKHAPFKKFRTRNRYSPWFSPDLTALNQHKNILWRSALASNSPRDMQLFREVRNQYTQAVRKAKASFFKQKFASCSTNSKKFWDTVKSMENKSTSSQLPTALRIGNSVTTDKSTIIENFNKHFSTAGHAFHLATPTPVNSTAPPTATRPSLPHFSFSQIQSADVLKELQNLDPYKSAGLDNLDPFFLKLSAEIVATPITSLFNLSFVSSEIPKDWKAAAVIPLFKGGDTLDPNCYRPISILPCLSKVFESQVNKQITDHFESHRTFSAMQSGFRAGHGCTSATLKVLNDIITAIDKRQYCAAVFIDLAKAFDSVNHHILIGRLNSLGFSNDCLAWFTNYFSDRVQCVKSEGLLSGPLAVSMGVPQGSILGPTLFSVYINDVALAAGDSLIHLYADDTILYTSGPSLDTVLTNLQTSFNAIQLSFRGLQLLLNTSKTKCMLFNRSLPAPARPSSITTLDGSDLEYVDNYKYLGVWLDCKLSFQTHIKHLQSKVKSRIGFLFRNKASFTHAAKHTLVKLTILPILDFGDVIYKIASNTLLNKLDAVYHSAIRFVTKAPYTTHHCDLYALVGWPSLHTRRQTHWLQVIYKTLLGKVPPYLSSLVTIAAPTCSTRSSRYISLVTPKANSSFGRLSFQFSAANDWNELQKSLKLETLISLTSFKHQLSEQLTDHCTCT

SEQ ID NO: 2434 - protein, 979 aa, synthetic construct
  source 1..979: note = Description of Artificial Sequence: Synthetic polypeptide
MAPEGMAAVLSALNQPCYFVCFFALFVTCFVHNVAATVSYDRKELLDIRTAITHLKLDKEFFFNESDGRDILQTPDQAQIPVIRWRRKRRFRGKRSGCLVRIRRRVANLPLPSVLLANVQSLENKWDELKARISYQRDIKNCNILCFTESWLNDDIKNIQLAGYTLYRQDRTAASGKTRGGGLCIFVNNSWCTISKEVSRFCSPEVEYLMISCRPHYLPREFSSVFFVAVYIPPQTDAGTKTALNELYTAISKQENAHPEAALLVAGDFNAGKLKSVLPNFYQHVKCATRGKKTLDHLYSTHRDAYKALPRPPFGKSDHNSILLIPAYKQKLKQEAPVTRSIKKWSDEADAKLQDCFASTDWNMFRDSSDGIEEYTTSVTGFINKCIDDVVPTVTVRTYPNQKPWITGNIRTELKGRAAAFKERDSNPEAYKKSRYALRRTIKQAKRQYRTKIESYYTGSDARRMWQGLQTITDYKGKHSRELPSDTSLPDELNNFYARFEASNTETCMRASAVPDDCVITLSAADVSKTFKQVNIHKAAGPDGLPGRVLRACADQLASVFTDIFNLSLSESVIPTCFKQTTIVPVPKNTKVTCLNDYRPVALTSVAMKCFERLVMAHINTIIPETLDPLQFAYRPNRSTDDAISIALHTALSHLDKRNTYVRMLFIDYSSAFNTIVPSKLITKLRTLGLNTSLCNWILDFLTGRPQVVRVGNNTSATLILNTGAPQGCVLSPLLYSLFTHDCTARHDSNTIIKFADDTTVVGLITDNDETAYREEVRDLTVWCKDNNLSLNVIKTKEMIVDYRKRRTEHAPILIDGAVVEQVESFKFLGVHITNKLTWSKHTKTVVKRARQNLFPLRRLKRFGMGPQILKRFYSCTIESILTGCITAWYGNCSASDRKALQRVVRTAQYITGAKLPAIQDLYTRRCQRKALKIVKDSSHPSHRLFSLLPHGKRYRSAKSRSKRLLNSFYPQAIRLLNS

SEQ ID NO: 2435 - protein, 1037 aa, synthetic construct
  source 1..1037: note = Description of Artificial Sequence: Synthetic polypeptide
MCLSIPVLSSLHRPYKRFTPRGRCHSNLVVPARTTHVEFQVSGSLWNCRSAANKAEFISAYATLQSLDFLALTETWITTDNTATPTALSSSAHVFSHTPRASSQRGGGTGILISPKWTFSLSPLTHLSISSFEFHAVTVTSPFKLNILIIYRPPGSLGEFINELDALISSFPEDGSPLTVLGDFNLPTSTFDSFLSASFFPLLSSFDLTLSPSPPTHKAGNTLDLIFTRCCSSTNLIATPLQISDHYLVSFSLLLSSNTSHSAPTRMVLRRPNLRSLSPATLSSSILSSLPSAQTFSNLSPDSASSTLLSSLSASFDFLCPLSSRPARSSPPAPWLDDSLRAHRTGLRAAERKWRKTRLPADLASFHSLLSTFSSSVSAAKATFYHSKFQASASNPRKLFATFSSLLNPPPPPPPPPSLRMTSSTILKRRLTISDPRLLSQTTPLVLLTLPYPVLEALCYLLLPPESSSPSPPSSLSADDFVNHFEKKVDDIRSSFAKSNDTAGPAHTALPCALTSFSPLSPDEISRLVTAGRPTTCPLDPIPSSLLQTISGDLLPFLTSLINSSLTAGYVPSVFKRARVAPLLKKPTLDPSDVNNYRPVSLLSFLSKTLERAVLGQLSCYLSQNDLLDPNQSGFKTGHSTETALLCVTEALRTAKANSLSSALILLDLSAAFDTVNHQILLSTLSELGISGAAHAWIASYLTGRSYQVAWRESVSAPCALTTGVPQGSVLGPLLFSLYTKSLGSVISSHGLSYHCYADDTQLIFSFPPSDNQAANRISACLSDISVWMTDHQLKLNLGKTELLFLPGKDCPFHDLAITVDNSLVSSSQSAKNLGVILDNTLSFSTNIKAVTRSCRFMLYNIRRVRPCLTQEAAQVLIQALVISRLDYCNSLLAGLPACAIKPLQLIQNAAARLVFNLPKFSHVTPLLRSLHWLPVEARIRYKTMVIAYGAVKGTAPPYLQALIRPYTQTRALRSSTSGLLAPLPLRKHSSRSAQSKLFAALAPQWWNKLPHDARTAESITTFRRHLKPHLFKEYLG

SEQ ID NO: 2436 - protein, 1016 aa, synthetic construct
  source 1..1016: note = Description of Artificial Sequence: Synthetic polypeptide
MLPPIMNTEAVFLKPRTPFKLASFNVRTLMQIRQQIGLAMSLEGLNVDVCCLSETRIQDSSEVLQIRSPSVASKSLFHVRLSGDPVASSSGLAGVGVALSARAEAALIDWIPINSRLCAVRLESSIKVRRNRREKRCLFVISAYAPTDCSPDAIKDEFYHQLTVLLQKARSTDIVVLAGDLNAQVGRLGTEESRLGGRWGLVGRRTDNGDRLLQLCTDHNLFLASTNFRHSHRRCATWRPPSASQAWTQIDHIAISYRWRGCVQDCRSFWSTYLESDHALVCANLTLLFSGRRIDHHQRIDVSKLAATSVASKYRAELASRLATIPPKSIDEHWLHLHDAMKMASKAACGFAKRPAYKHWVSSGSLQLMEARRSTPGDREFDHKRRLLRNEIGQSLRKDREAWWSERANEMEAAAASGNCRKLFQLIRATGSKKSGVSETIYEDDGMPITNISRRLGRWAEFFEGQFNWPAAPATSTSLSCPPWPVTTDPPNEAEVRKELQLLKRYKSPGPDDLPPALFKDGGDFLTKELTVLFAKVWEQESVPTSWNESIVVPIFKKGSRCSCNNYRGISLLPIASKLLASIILRRLFKTRERLTREEQAGFRSGRGCIDHIFTLRQMLEHRHTYRRPTIVVFLDIRAAFDSLDRTVLWDCLLKKGVPEKFINILKALYTNTSGRVRAYNHLSPLFHSSSGVRQGCPISPFLFNFAIDDILETALMDVSNGGVDMLPGERLLDLEYADDIVLLCDNAQGMQSALNQLAISVRRYGMCFAPSKCKVLLQDWQDSHPVLTLDGEQIEVVEKFVYLGSYISAGGGVSDEIDARIMKARAAYANLGHLWRLRDVSLAVKGRIYNASVRAVLLYACETWPLRVEDVRRLSVFDHRCLRRIADIQWQHHVSNAEVRHRVFGRRDDNSIGVTILKHRLRWLGHVLRMSSQRLPRRALFADSGTGWKKRRGGQCMTWCRGMKESCKGLASVGPSRLPGWGPRDGATQWLETLSDMAQNRSQWRSCCNLLLLST

SEQ ID NO: 2437 - protein, 2266 aa, synthetic construct
  source 1..2266: note = Description of Artificial Sequence: Synthetic polypeptide
MKIEIGEFAALFQRFFEQLNAKSKQEEEFRNESVPGSRVPSEDMPVFQINERFHALERSNELLNGKMDSIVNTLNYLISGLNGNFDNNNKLNCICKTNHVKEPLSIVKTNLVSELPSALLVQNKVPCLKLSEEDLIRKIPTKIVPSKKVSKKTIEHTSRVNFSLFVRVLDSNERQQFFKLFPNLFALLKSKESEKKSEVLNIELTKISKKDNPLNIAGFKNFFFRNNNICVTIDFYNSSKVKSKITKNLKIKTSLINSKIVKNYNTNKFIPASLSIKKFLFVLSDKLAETTNISNVTVREEQINKIITLLKIKNSLPDYLVKSQIKYKDGDFLMLDLLNSCEIEGELGQKITELSRSQIKELFNSFPEIQELFFIEKKANSGTFFHRKKSIDENPEKLINLINKFKIEKTFPQQISFVGGKFVKIDKLNDSQFPQVESESDIMFNLGLFSLFGLSEYDNILNSLLCQPKSPEKLVDIIFHLNYLNLKGNFDTSTNGTYENYVQNYIVNCLLMHSILDLETCAFLNLDNIELWAPKLIELIPSSSHYSSSCKEKLLKLKQWKLSGEIDRIHNIICPETIIEINNFLGVIDQSYTTKSDQLKFLTSLGEKINNIEIDNDVDDLVKAKRMLYFIIRDKKRFLNKDNFNYRIPFNCRKICTLKMSDFITKLIQSNELFEEREAVVDNNIDVSPNENLNILIVEPVNPTPDTVIVGQMDTFPTDIDETEPVTIDKPLKKITSKQAVKPKAQKSKREVPASVSISVPISEETDADSTIINYFFPERDPKIWFTDDDIDYYLESHIGNPNFAPVKCFIVEILSSNCKDEIFPMPDNLFKAQIILCPLNINESHWILFVYCKLTKISYFVDPILRKRHNLINKSSALKITMALNNLFDLKAAVTFHPHDNLVYQDNNYDCGPYICAYAMLISQEWQTFPNNFIETIRKNVHRFQTSKFQNPPKVSGGGITTLPIFKRFQNVTRPPKVALPYKASLQNENSCVPSLIKEWFSNKNYITVLSPELTLNLIAHNNQFIRENVTFRQFTRVKYVIAVIPNNPHWCLYIFSPVFEHSYILNFQGRVLNERLVSIGESMTDYLNKFFISTAKVNFIVNHNQTHFSFRSEDPHFFASAFIEFLERFFFGNILSFTKINETLKSFKLQITNEICKNLNLINFSINDEIITKYFKNLNLPSNFIFLNSAMCTAIMDDCTRYLNDFLNYDNIIKAQVIFAIVAPPKFREILFIIDYNTDEYYLLNPTTLLGNDNYLSTCKILRNKINEIRESPNRVLNLGECPHDIRGSGLVSKILFCSYMSNYANDLPLVGLNLRQIGNVVSSFLPIVSEIKKVKSLENNIINQNHKESENLKERKNKIDQLLIKVFKMNVDEIVDVILDQISIKTVPTHKPYLGNKERVESQINKSNLIKNFNSDMKTTVNTIINDVDVDVRPKYENIITNFEHKIPLDRTWDKVFKFCNRSDKKLKLKYLSNSEVLFELKKADNTSPGVDGIKYRDLVMLDPEGKLLTFLFNKIISKKVIPDSWKSFKTLLIPKPDKGDKYDNVSSWRPIALLSVIYKLFASCLANRLTFWINKNNLLHIGQKGGSRHDGCVEHNSILSSALEHSKYSKNSPLAIAWLDIKDAFGSVPHAYMWSLLRFVGVDEEFVTILERMYSDTSTFYSCGPILTPNIAIRQGVKQGCPISMILFALAINPVLEAVSRSKCEPFMIGESAVKILAYADDIALVSKSAYDLQRVTNIAVAIASEIGFEYRPEKCGYIELPLIETESQILINDIKIKKLASSEFYQYLGVPVGEETDQSPYDILKKVVSDTRKIADSDLLGWQKLKAYKIFLHSRLVFPFRTREIKTSALAKSNANNNLTVNITSQLRNCFRKMMSLPNHSEVCYFYNSTENGGANCVDLLDEYHTQTITHFFRLFTSSCEFARKVNLDSLNFVAGPRLGIINPTLQERFDWINGKEPKPRHSGKKTRFQRARIAIAFFKKEHDINIMFIVTKGQPSLFITSEKRGTFILTPDLRKTTSKVLHMALCDSYLSKWEKSCTSNFIASAIKLSPKINKAIYRGDISEFAWHFIHRARTNTLSINAKPHNKGNKRLCRLCHTEDETMSHIIQSCKIHLTLGSERHNDCLDLISSHLSKNSNLIVVVDHVCSLVPESKERVDLMITDMVRKKIFLVDMKCPCDTINNFALVDLLNLQKYDSLKMQIQDAKPDFKVELDTCIIGSLGSFPPKTPELLLKIGVDRTHLKGLLKDCALSNISHSARRWH

SEQ ID NO: 2438 - protein, 1251 aa, synthetic construct
  source 1..1251: note = Description of Artificial Sequence: Synthetic polypeptide
MSVNLKLLSINVRGLRDRVKRKKIFQWCKMSANMIFLQETFSTEDIEYSWKGDWEGSMFFSHGSNHSRGVIVMFKPGITFVVEKTLIDEGGRYVIIKGKCQGEKLILGSVYFPTRNKENAQCDFLSDLNKIICSVFSQEYSLIIGGDFNVIMNHNLDYMGASNISKSKYRDSLLDFLDKLDLIDVWRKRHPNKKEFTFRQKQPLVQSRLDYIFISSKVDKLIRKSEILPSITPDHAGVRIEFNNLVDSFVYGKSYWKFNSSLCNEKDFVDGVKKKISEIEETWRNQITSKIKFWDFMKMKLREYIMKFSRERAKLRRVHIAKLEKEIKDLEYRLTINIDCHKSIQDEIDMKKMELEKLFDYSRQGLKVRSRTEWSEEGEKNSKFFEQLLKSNKRKSVIKEIYNENKETVRDGKGILKIIREFYENLYACKNGEITEDIENMFLNELPKLSKENKEYCEGKITLAECYQAVKEMKWNKSPGNDGFSTEFYFTFWPILGKTIVEAFNESFETKMLSNSQRQGVITLIEKEGKDPLYMKNYRPITLLNVDYKILSKVLATRVKEVLEDIIHYDQVGYVKDRNIGEAVRLIDDTFFQSLYQPVGFLIAVDFEKAFDCISHKLLFKALEQFGFGKVLCSWVKTLYTNVSSCVMNGGHSTGYFGINRGVRQGDPLSPYLFVIVIELLARYIRKDESIKGVGFGNKEIKQVLYADDITLFLKDMDSINKVKKVFKNFEKLSGLKINMDKTNFMWLGEESDRPGLPFFGHRVQHIKILGVYFARHSKIKDDLNYKEILSKIKRLIGWWKQRDLTMFGKIKLLKIYVFSKLNYVSSLMTVPQNIFEEIEKISFNFIWGGRDRIKRKILYQDYCAGGLRVTNFKIFIKTQRIMWIKRLLYGEKYSGWKVTFDHFFRSLGGRIIFLCNYDINKMDLKGIPSFYKDMLKAWQELDKCRHFGENKNNPIIFSNKCICLSNKTFFDVELFQKGILQASDIIVRGHLKPILHFLNLGFETKSLLRIQKIFSAIRNDWIQSDFMEVDTENFEIELMIFGRLQKLCDIKSRRLYDYFIEDLQKEYTLHVTDGNCQFDLGMTELKETFTRMKCAMLCNKHREFQYKQLQGAVYTKRELFKFGFESDHFCSFCRLEVETYQHLFLDCLKVKRLWQEVIQKLHLIEIDIDDWKPIFMGISGNTARIFVINCIIFLVKYIIFISRKEGTLPSVQKTVHMLKNYRDEEYKIAFKKGKLGMHLQKWEQIDAFLL

SEQ ID NO: 2439 - protein, 456 aa, synthetic construct
  source 1..456: note = Description of Artificial Sequence: Synthetic polypeptide
MQVNKALRRINTRKATGPDNIPGRALRACANELTDILTSIFNLSLSQRVVPSCFKTTTIVPLPKKSPPTCLNDYRPVALTPIIMKCFERVMLTHIQSSIPDTLDPLQYAYRPNRSTSDAIAAALHTSLSHLENKDSYIRMLFIDYSSAFNTVVPHKLTHKLFSLGIHPIICDWLLDFLTGRPQSVRIGNRTSASIITNTGTPQGCVLSPILYTLFTHDCVASHKDNIILKFADDTAVIGRITGGDEAAYRREVASLVTWCEDNNLTLNTDKTKEMIVDMRKERRNPHQPLLIRGLEVERVSSFRYLGVHLSQDLTWTLNTSQLVKKAHQRLYFLRRLRRFGMSPKILSNFYSCMVESILTSCITVWYGSSTAADRKRLQRVVKTASKITRTPLPSLQSIYKRRVCRRAASIIKDPTHPQRGLFTLLPSGRRYRSVKCRTTRLKNSFFPSAIRLLNS

SEQ ID NO: 2440 - protein, 850 aa, synthetic construct
  source 1..850: note = Description of Artificial Sequence: Synthetic polypeptide
MANTIESMTFWGCLDDLVRSITLDQFLFVGGDFNGHIGARADGYQGVHGGFGYGVRNDNGSTLLEFATAHDLVIVNSCFRKRDDNLITFRSGGHATQIDYLLIRSRDFRFCSYCKVFPVEACASQHRLLVMDLSLDGPPMEGLRVVTPRILWRNLHGSKVAEFKDMLEGFFRLEDDVDQMWIRMADLIRGVARRTLGVASGNVKEQRESWWWNDDVQAKVQFKKGCFLEFMSCPEGPDRHIKRELFKLAKRMAKQAVAEAKTKAYQDMYRRLGTKEGVNEIFKLAKARNKRSQDIGAVRYIKDEGDRVLLYDGDIIARWGRYFSELFNAARGREIVFEQENVNVSHNDVGMSQDITMAEVRVALGMMGKGKTVGLDEIPIEVWQCLGEQGVRWLTALFNVIFRTSRMPSEWRLSVVVPIYKNKGDAQSCSNYRGIKLLSHTMKLWERVIECRIRRIVTISVNQFGFMPGRSTIEAIYLIRCLMEKYRECRKDLHMVFIDLEKAYDSVPRVVLWRCLAARGVPEVYIRTIQDMYSAVGTCVRTPVGDTQYFPVEVGLHQGSVLSPLLFIIVLDVITRDIQAPVPWCMLFADDIVLIAESRSEVNVKLEQWHMSLEGYGLRLSRSKTEYLWANFSEEIHEADVAVCIAEGRVPQTNTFKYLGSIIQSNGDISADVTHRISTGWLRWWAATGVLCDKNVPLKLKGKFYRVAIRPSLLYGSECWPLRKAQERRLETAEMRMLRRICGNTMTDHIPNDTFRRLLGVESISKKIREGRLRWYGHVRRKCNSAPVRRVEHISVRGKRKRGRPRRTWADQLSLDMGALNLTGDMTLDKNDWRRRIRVVETRSRGSQRL

SEQ ID NO: 2441 - protein, 655 aa, synthetic construct
  source 1..655: note = Description of Artificial Sequence: Synthetic polypeptide
MRSTMLSNEFLTKSVINLSQKNLTDEQINLLSRGLKFSPVTKLKNHDDFIVNIERGLHQLAPGGHINYLRHQVTEILAKNKIQPNNLTKVQRDALTDLRQDNKIAILPADKGKATVIMDKKEYQETVTELLSDAKTYRRLRKNPTSIYKDRLDKKLNELESSNQITNQLKFKLRSSRHPRSPYARATIKIHKNPIKARLLICSRDSVFYNIAQHLSRILAPLGKTADSFIKDSEEFVTKLKELQITGKMYSYDVVDLFTNVPCKDVLSIIRDKISKLETPLDTTLTTDSIVDLIQMCMSSTYFTWGDEIYEQIHGLPMGSPLSPLITEIYMTAFEEKTMETSPISPICWFRKVDDTFVMLRAEDDPSALLLNAQHKRINFTMEAEEDDSIPFLDVRIKRLGGQLKTCVYRKPTHTDQYVNYHSNTPQHVKRAAITALVRRAKRICDPEYFQQELQHIKKVFCLHNNYPPAFVHQAFRSVLMAKPTNQQPNPNRPSTRLAIPFIGKASYQIKKILKKSVGIETVFSGNSTLKDLLRASGKLNPSNNQKPKGCVYQVECSCGSSYIGETKRPLDVRLKDHQDKPGNEGTSAVAEHLAMGRKTGHKVNFDNTNILTINKHIDKTRRLHEAIHIRRYQPDLNRDEGVRLSHAYDKLINL

SEQ ID NO: 2442 - protein, 964 aa, synthetic construct
  source 1..964: note = Description of Artificial Sequence: Synthetic polypeptide
MIPELCSTGLKICHININSLPHKMDELKILLGNDPFDIVAISETHCDSTITDLDISLDNFCVTRKDRSRHGGGIALYVKNNISYEVISQLDNELEVIFVKVKQKQTHPLYLGVVYRPPNSPNEFFDKLSEIIHSISENAGEIIIIGDFNCDLLPEICTPFSRALLSLMDTNLLHQLISVPTRVTPHTKSLIDHVFSSIPEEHQHTGVVKTHISDHYLIFTVFGYARAKQKNDDNIIEYRCFRHFSNDNFVTMLQNLPFNENLNDKDPNHAWQCWVDLLISAVNKHAPVKSKRIRSKLCPWITGDLIEAMNRRDWLYTMATKPSNPDSSEFWSEYKSLRNEITCMIRNAKNDYINALLHENGGTPNAMWKTLKLISSSKKESNLKLEVDGEEVIDAEKIANHFNNYFVDAVDTMFNPLNFENDVNNSTIDRASEPSVHSDTVDTVPPVNSFDLPVITDEFVMKEIERIPIKKATGPDDVSIKLLKFACNSQNVIQSLTYILNSSLDQGIFFDEWKIARVQPIYKAGSKLSVENYRPVSLLSIPSKILEKAVNTEFQEYLKVNKILTERQFGFRPNHSCETALLCMVDLWAQNVDKGNLNGVAYIDMRKAFDAVNHSTLLMKLKNVGCTDRAIKWFRSYLGGRSQFVSIKGKKSSTRTINYGVPQGSVLAPLLFSIFINDLPTSIHSADMFLFADDATMSVQGKTLSEIQTKLNLALDEVYSWTQKNKLLLNTTKTKVMVIGSKQKLQTLNENNLNVRIKTTPIECVTQYKCLGVIVDSNLLFSKHVEKVALQMKQKLGILRRLKGTFNKHYLSMIYWGYILPHAMYCCTVWTNRSLHNYETINKLHKRAAYIISGCSWSTPSHEVLLQLNWSTLEALYSRAMGIMAFKCVHHLAPALLANKFILHDDVAQRMTRNSHELKLESNRCNTEFFKRSFVNSAITLWNNLPIETRFSPNLNVFKSNLSH

SEQ ID NO: 2443 - protein, 1112 aa, synthetic construct
  source 1..1112: note = Description of Artificial Sequence: Synthetic polypeptide
MATTQASVKPTAVATCVCGKICKNPRGLKIHQTKMGCLASVQPEQRARFSLSESREVPARAEPYGPQQPHSPEALGETQEERGQESPHSAQNLRAQVAQAPDNPQHHRRVKWPPASKVSEWQQLDEDLEGILESTAKGGVDRKLQTMTTLVISFATERYGTMEKRAAPEKYTKNRRAEKISQLRQELRVLKKQFKGASEDQKPGLAELRCTLRKKLLTLRRAEWHRRRAKERAKKRAAFLANPFGFTKQLLGQKRSGHLECAKEEVDSYLHDTFSDAERENSLGECRVLISPPEPACSFNTKAPTWKEIQTVVRAARNNSAPGPNGVPYLVYKRCPKLLARLWKILRVIWRRGKVAHQWRWAEGVWVPKEEKSTLIEQFRTISLLNVEGKIFFSILSHRLSDFLLKNQYIDSSVQKGGIPGVPGCLEHCGVVTQLIREAREGRGSLAVLWLDLANAYGSIPHKLVEMALARHHVPGPIKTLIMDYYDSFHLRVTSGSVTSEWHRLEKGIITGCTISVIIFALAMNMLAKSAEPECRGPITKSGIRQPPIRAFMDDLTVTTTSVPGCRWILQGLERLMTWARMRFKPGKSRSLVLKAGKVTDRFRFYLGGTQIPSVSEKPVKSLGKMFDGSLKDAASIRETNDQLGHWLTLVDKSGLPGKFKAWVYQHGILPRILWPLLVYEFPISTVEGLERRVSSCLRRWLGLPRSLSSNALYGNNNKLTLPFSSLAEEFMVTRAREVLQYRESKDPKVALAGIEVRTGRRWRAQEAVDQAESRLHHKELVGAVATGRAGLGTTPTTHLSRLKGKERRDQVQLEVRASIEEQRASQWVGLRQQGAWTRWEEAMARKISWPELWRAEPLRIRFLIQSVYDVLPSPSNLFLWGKVESPSCPLCQGRGTLEHILSSCPKALGEGRYRWRHDQVLKAIAESISSAMEYSKRLPLPGRGVRFVRAGEQPPPQPRAQPGLLATARDWQLRVDLGKQLKFPENIVETNLRPDIVLHSQSSKQVILLELTVPWEERMEEAYERKAGKYAELVEDCRRAGWRSRCLPIEVGGRGFAGKSLCKAFSLLGITGMRRRKAICAASEAAERASRWLWIQRDKPWTSASWTQAGN

SEQ ID NO: 2444 - protein, 1037 aa, synthetic construct
  source 1..1037: note = Description of Artificial Sequence: Synthetic polypeptide
MNDHLSANMHRTLSHSGRTTSSTMEAPTPPSTVESLQPALISRPDPVVGRGGGVFQPVLSGKYNKITDSLLPDISPPSSLRIYYQNIRGLRSKIDSFFLAISELDYDVIVLSETWLDDCILSSQLFGSNYSVFRTDRSALNSDKGRGGGVLIAVSSRISCSVDSAPVSNQLEQLWVKIVLPRNNVSIGVIYLPPDKKNDIDTIQRHIESIGAVHSHLHENDMAMLFGDYNLSDVHWTSDANDNVFVDLTRTRLNPASSTLLDGFCFHGLSQVNTIVNSGGRTLDLVLLNDVVLPNHSIHEAVEALTTVDVHHPPIELVVSCPLPVVYETVSDNTGFDFKKANFESLNVALRSMDWDRLDSIEDVNEAVAFFTNSVMQAVAEHVPPRRPPSKPPWSNSRLRLLKRRRSAALRFYRSHRSQQSKLHFNRSSSEYRSYNAYLFAQYKSRTEQNLRSNPKQFWSFVNTKRNEDGLPTSMYLDELSADSASDKCELFAMQFKRAFNDYASPASQIDRALQDTPQDVFSYDMFHVSEEEVIGAIGKLKFSYNPGPDGIPPALLKRCSSTLLAPLTKLLNHSLRQQVFPACWKKSFLFPIHKKGDKRCVSNYRGITSLCACSKVFEIIVNDSLFESCKRYISTDQHGFFPKRSVSSNLVEFSTLCIRAIDAGKQVDAVYLDLKAAFDRVDHRILLQKLRKCGVAINFVDWFRSYLTERSLCVRIGESESASFTNISGVPQGSNLGPLLFTLFINDVSLLLPTGNRIFYADDAKIYMIVESLDDCYRLQHLLNLFEAWCTRNCLTLSIEKCQVISYGRKRSPIRFPYELSGTTLERVKCVRDLGVTLDEKLTFNCHLNDVISRANKQLGFVLKVSSGFKDPLTLKALYCALVRPILEFAAIVWCPFQNYWISRIESVQRKFVRHALKNLPWRDPENLPPYHERCRLLGIDTLENRRHVAQTMFVAKVLRNEIDSPSLLADVNIYAPERTLRRRQFISLGSRNTRYGQHDPVRFMALKFNEAYHLFDFNVTITTLRNHFIQYFRRN

SEQ ID NO: 2445 - protein, 997 aa, synthetic construct
  source 1..997: note = Description of Artificial Sequence: Synthetic polypeptide
MKINQANWDKFATHTNNNNNLYPPSTNINKETAQINKIIMKSAHLAIPQTLPHRHTHTVPWWNKDLADLQEKKKQTWKALKRDTTQENIIKYRKTNALFKRAVKIRKKEATSKFTSTIQPNTPTTKIWNNIRRFCGLNPVKQIHCITNNNVTTNDKQKIANLLAQHWSQLSKDSNFSQEFTSHKYNTTTLNHIPSKSAMEIDKPITKLELTIALRSLKGITPGINRISYPMLKNSPLAIQNRILSHFNHIFENYIPQSYKTSLIIPILKAQKDKTDIASYRPISLNCCVGKTLDKIIANRLWWYLNSNKLLHPHQYGFKKGKSTSDNLLYADHIITKSLNTRKHTSLISLDFARAFDRVGIHSIVDQLIEWKCSHKIINYIINFTKNRKIAVRIGSSISNFYPLENGIPQGSPISVVLFLIAFNKLANILTIYKEIKFSAYADDFLLLVNLKNQKNTTINLTHIFRKIYDWGSYSGASLSQTKCQHLHICRKHRCNCTITTQNSNIKNVTSLKILGLTINNRYNWSSHINSLIPSLSNKHNIIKCLASHKFNCNTSTLLNITKSILISKIDYALHIYGYTPKNFLNKLKTTLNAALRTVLGAFRTTPTHNLLYEANIPTIEQQRDHLTTKLFTNLTRSKDTPLHKHIQPKTNNKKWTSTLERTIENCQLHNIPFKPTKLYKTKPPWQLPQNIINTSLHNYKKTNTSSDTFQKLFFEIKETYKNHTFIYTDGSKINLNTAFAVTTETDVLRYGILPPSSSILTGEMIGILEAIKISTTKRGKSVICSDSLGAIEAIQNPLNLNKYPTYIRSLLQTKQPKIKILWIPGHSNIKGNDLADRTAREATKMPLIYTPNENITDINKMLKNILIQEKETLINKCNTWYKNINTNNTHISALSKIQQEEISRIDQIKFIRLRLGHTSLTHKHLLDPNTQRNCYRCQSSTPTNMEHILDSCPAISQNKQNLLKNRPATEYLKNPTAENIKVIIKFLKETNLYNEI

SEQ ID NO: 2446 - protein, 1237 aa, synthetic construct
  source 1..1237: note = Description of Artificial Sequence: Synthetic polypeptide
MVVSKDTTQAINTAIEVLRKELIERIIKVEKENERLNTENESLKKQLAEQCNQNNNKPLFSSLIKKTSEGAPPISDSETRLLNAISAEQKEKIKKEKNVLVFGLKESKRKSKDEIKEDDDESVGEVFDAIGLDKSCIVKHFRLNSRDKNRPGPLVIELVDPSYQKQVLSVARDLNKVEAYKNKVFINPDLTYRQRASLKLLLGERNSLNKIEEGQKFDISICYQKRYAAENNRGRSKVRHFDLLSETICCRKLKSKNTKKINAPSSLISKLSEITCLYMNATSLNNKFDELIEVINSNKANVVMICETWWNNESVTNINGYTLFRRDRGVGRGGGVCIYVQNNIKAYEVSEKCLNDPNIEQIWCVIELGSEKVLCGSMYRTGISNISNCINITKSINFAHSMNLLNKYTGILICGDFNFNAIKWTEDYYGTLTSETDTPAKIFLECLNNCFMHQNVIKPTFQNNIGNETNVLDLIIAENKNRVYKLVHLPPLGGINHGHHIIKFNYSHEECIDNIVLIKEKFNFNRGKFDKLNNYFKILNWDNEFKGLEINKCYEKWLSLYEEGCKLFIPIIKSGSIQINTKPLWINRELKALSKEKRNVWFECRRQKFRDNCLLAKYKELNKVYKKKSESKNTRFIKKKVNQRIKDFEYDLALNSKFNPKKVYSYINNKSKVKDNIRAIQLKNGSIETDLKVIANTLNGYFASVFNKPQTLSAPIIDIETQKICKNPDFNASVVEEYLNKLDTNKATGMDRVHPKVLKECKSTLAKPISLLFNKSFETGKLPKLWLCANIVPLFKNGDKLNPCNYRPTCIFNICSLTHATIDLPVSLTSVVCKVMEKIIKDKMMKHLVENKLINKNQHGFVNNKSCVTNLMESLDFITSSIDNGLDVIVLFLDLAKAFDSVDHERLLLKLNALGFKSKLFDWCQGFLKNRLQRVVIGNNKSEWEEVVSGVPQGSVLGPLLFVVYINDISNKIKSSCKLFADDMKILRAIKNDNDVIELQQDIDLLMEWSNEWLMKFNQQKCKVMIIGNSQHKVLMNNTALAYTSMEKDLGVYISDDLEWKHHVNKAVNKANQKLGQIKHTFKYLDEKTMKLLFIALVRPYLEYAAPIWNPYRQYDKDKLECVQQRASRIKILKGYSYEERLKKLDLLSLENRRRRGDLIQMFKYLKGYDIINFYTKPEMLDNGYKTRGHNSKLRRQYTGNIKRHNFFTNRVVNDWNNLEQETIDAVSINQFKKKIG

SEQ ID NO: 2447 - protein, 489 aa, synthetic construct
  source 1..489: note = Description of Artificial Sequence: Synthetic polypeptide
MIPVQLIRDSAPYISHPLAYIFNLSLETGKVPDEIKIAKVTPLHKKGPREDPGNYRPISVLPVIGKVLEKLINIRLIQFLEKNDIFYYHQYGFRKKYSTKLSLINLINSTLKSIDQGKVTLGMFIDFKKAFDTINHNILLGKLSSYGIRGLPLEWVKDYLSNRFQFVQCGQTLSERKKIRCGVPQGSVLGPTLFLIYINDLPTVTDYFNFRLFADDSNLFHTFSADQGEIDVNEVNNNIQKIHKWCTANKLTINSMKTNFMLICSRRKKIGINGKLKIAGEEIKEVDVATFVGVHIDRHLSWKSHIRFVNQCIRKKVGVLFRLRHFVPSRTLILLYKAFIQPHISYGIEVWGSTYKTSLRSILYSQKMAVRAITFSEWRTPSDPLFKRLRILNVYNLHDLSISTFMFDLVNGNLPHILIEYCDIIEHSYSTRQKEDGQLRLPKLRTTQGQFSLSFVGSEFWNRLPVDVRLTRSRNRFRNSVTSHLLNKS

SEQ ID NO: 2448 - protein, 1004 aa, synthetic construct
  source 1..1004: note = Description of Artificial Sequence: Synthetic polypeptide
MLCRARFVQCLNEKHVSVSTLREFLSPSDPQSTNNFTQSHYTPDEFNTFVTQKSLDKDVNNKLSFININCRSLQHNFDALSVLMMSLRMQVSIIGVSETWLRDENSQYSLCNLDNYVFVGNNRRLGRGGGVGIFIRKDINFKRRTDLDINESFLESIFIEIERFNSSILICVMYRPPSQPVDDFLMSLVNVFDVVNVEKKLFYLMGDFNIDLLNVGKVQSVNDFLNILMLHSMIPLINEPTRVTDRSSSLLDNIFTNDSCYIYSGILFTDISDHFPVYCICDTDIPKSSCETDFYKRHLNENNIRMYFLQLLYSTEWYLSSDVNSSYNNFVFKFMKVYNLCFPVKLVRMKYKRKNKPWITNEIIKLSKKKCRLYKLLIKNPNVYRKEVYRKIRNELNNKIKIEKKNYLKKSFKDSTGNMKKTWDIINKAMGKKCKMTNIKEINNNDTVITDKNDISNNFNEYFVDVGYNLNCKFDCFDDSECIKYIGMNDKSMFFKLVTSSEIEDIVKKIKNNTSAGYDDVDVKIVKKCIYLLSSHLCTIFNQCLEQGVFPDKMKIAKVIPVFKNGVSETMSNYRPISVLTVFSKILEKCMYNRLYAFLTKCNIINDNQYGFRAGHSTSCAIIDFIHKVASAIDNNEVMLGLFLDLSKAFDTLDHHILLVKLYQYGIRGIGLDLFKSYLLHRHQIVSIANVKSNYQEIKCGVPQGSILGPLLFILYINDLPSVSRILKSILFADDTSIFLSHQNIQSLQDIFNQEIKLINTWFSVNKLSINISKTHYMIFTNKKCDTDSIIIRLCNTEIKQVSSLKFLGITIDNKLKWTDHINAVCNVLSKNIGVMYKLKSFPKCILKMIYNSLILPFLYYGILAWGNAHETHIRKVILLQKRAIRTICHTSYLAHSHPLFKEMKILNFTDMYNYQCAIFMFQCYLQILPKSLLKLFILNCNIHHYSTRNAENFHLPLVHTTSYKRTVIFNGPCLWSTIPRNIRELKFVNTFKRKYKKYLMDVY

SEQ ID NO: 2449 - protein, 1033 aa, synthetic construct
  source 1..1033: note = Description of Artificial Sequence: Synthetic polypeptide
MAIITGEGDCHLLKKSLLKLKTMKNKTNKLNVNKGNDLDVTFPCDFCGLSFPTKIGRGVHISKAHRVERDAKLSGHASAKKAYYWSTEEETRMAKIHLQEESRGDSNHVLRAMHSACSTGRTLESIRLHMKAKRYVKIYTELRNEKQIQSSGVENILNNISDASPLTLPSETETLTSYLLNLPLKKGVSKWREQDLDFIIHSVSDSEEQKRLLDVYCKTVTEGYRKGKTGPLKKSTKVSPHHATTTKSKKFLKKKLKRELYGKVQQLWIKDRCEAAKLVLSGKVSTLICEEDRSARQGEYWKKIFERESEPDIRPVPEVYADPMLVRPISEDEIKKVVKDIKLKTSSGPDNISTEVLREIPVLVLVKLFNLIILLSHLPSEFKSSRTTLIPKVETPKDPGDYRPISVSSVFVRALNKILASRVSNGNKGAHAQKGFKALDGCLENTVLLNCILGDAKINNKSIALSFIDMKKAFDSVNHDSILRAATIAGYPKLLLGYIKESYNGADTEVEKIKATFKRGVKQGDPLSPVLFNNIVELAIKKAYESGIGYRMNGTVFPIMAYADDIILLSESKEGLQDLLDIVLTELRHNGLEANADKCASIIAKKDGKQKKWVISSDSVLAAGKTMPCMNANSMYKYLGIYFGPLGITTERLTKIYSNQLYNIGIAPLKPQQRLEMINDFLLPGILHEAVLGNTNVGELKDLDKMTRVAIRKWLHLPKDTCSSFIYTGVKQGGLGVRSILAEVQFGKISRLESLNKSKDTRIQALTTCEVVKKAFRQWSKPIRVGDSIATSKVQFYEANRELLLSKCDGKGLREAGKIPFAHDWLRAKGKLMKGRSFINSIKVRGNLFGTPVRLNRLNKSGIPLIKCKMGCLMPCSLNHIAQTCPKVHGLRVERHNKVMNYIADVARKGEWKTLVEPIIPYGATIRKPDLVVIKDKKAMVLDIQVVSDVGNLNERNTLKSEVYNDKIIADWVKNAGADSVEFGAITLNWRGLWASDSWETVSKIGVNKSDAMIISLKVLNWTARMYCAWNKG

SEQ ID NO: 2450 - protein, 1002 aa, synthetic construct
  source 1..1002: note = Description of Artificial Sequence: Synthetic polypeptide
MATNDNDDQFVAEAQGRTHGSLSGPALSIISSNIEGLSGAKQELLADLCITTNCDILCLQETHRGPTRVRPRISGMTLIAERPHDQYGSAIFARNGLAVDKSYLSDINNIEVLSIDLMGITVSSVYKPPQEPFDLPGRATDGRMNVVIGDFNSHSISWGYREMNEDGELVETWADANQLSLIHDAKLPASFNSARWRRGYNPDLIFTSTRIANQCEKVILDPIPHSQHRPIGLKVNAVITPRAVPFRRRFNLRKANWEKFAKDFDSYIQDLPATPQNYDTFVELMKKSSRRNIPRGCRTSYIQGLTDHSKVMYEDYIEHFQMDPFSEETLESGENLTKEIGESRRRKWQEFIQSTDMTHSSRKAWKTIRILGNDYTKAQPRSEVTADQVAHQLLLNGRGNPDHHPRRARLPKVPDALSSQDDPGFTRPFTMDDLLAAIKAMKNNKAAGLDDILCEQIKQLRPGALNWLLKMFNECLGTNNIPKLWRKSKVIALLKPGKDAASPKSYRPISLLCHTYKLFERLILNRIAPFVDEHLIPEQAGFRPGKSCTGQLLNLTQFIEDGYESKLITGAAFVDLSAAYDTVNHRILTRKIFELTKDVRLTGLIQTLLSNRRYFVVLNGNRSRWRRQKNGLPQGSVLAPLLFNVYTNDQPIHPNTRSFLYADDLCIATQNQSFVKLEESLSDALAGLIPYYATNHLRANPDKTQISAFHLKNRDANHQLRISWYGKRLKHTPNPVYLGVTLDRSLTYKNHIANTKAKVGARNSILKKLANTNWGTDARTIRTTALALCFSAAEYASPVWSRSAHAPKIDPALNSSCRAITGCLRPTKVEDIYLLCGIAPPHVRRLVLSQKEKDKQENNPLHPLFEQQPVGKRLKSRHSFLHSVEPLNTSPHNQRMTLWSNHLQTTPHKLSLSPKESLATGSSETWPTWLSLNRLRTGYGRCRVLMQRWGLGDEQTACECGQEQTMEHLLVCPLLPEPCTQDDLEAVNCRAKACVDHWTGLV

SEQ ID NO: 2451 - protein, 1235 aa, synthetic construct
  source 1..1235: note = Description of Artificial Sequence: Synthetic polypeptide
MTLTIIQWNLRGYINNYNELQIIIKQYQPHIIALQETHLFNIHNIPIPINFSLYAKNYSPNFGGAAVLIHNSIESKEIHLQTDFDATAIEVESKKKFKIISAYISPSQNFNESNLHNVLSNNSSSLILGDFNSWSKLWGSPKNNARGNTVAKFLNNTNFILLNDKSPTHFTTHNTYTHIDLSFCSPDLFQYANWKIIDDLHGSDHFPILITLFNNNKQNKTQNNPIFKINSANWDAFKDKTDYFNTKNSPSNNINKESSCLNKILLQSAHLTIPQTSIKNHPRNVPWWNNGLQTLNNERKQAWNKLKKHITTTNIIRFRKAAAKFKKEIKSAKNKSLSSFTSEIQPQTKTSQTWSNIRRFCGLNNMKNIHTIIHPTTLQPTSDNPSIANSFAEYWSDQSKDSNFSSMFTNNKYSISTYQSSPPSQSAQKIESDITSIELSSALSSLKGHTPGIDRISYPMIANTSPAVKDRILKHYNNILNNYIPQAYKIGLVIPIAKPGYIKTSITSYRPISLNSCFAKVLDKIIAKRLWWFVTTNKHIHTNQVGFKRGKSVTDNLAYLDHLITDALSHKQHLSIVSLDFNKAFDKIGLHAITKQLQEWNIGPKILNYIINFMSKRKIKCRVANNLSSTFPLHNGIPQGSPISVIIFLIAYNKLANLITIQRNLTFTAYADDFHIIVKFKKNQTQENFNLDDLFQKIDEWCSFSGSSLSFDKCKHLHICRKHNCKCTITTRNLNIPSVDHLKILGLTFDSKYRWTRHIEDLASSLSNKINIIKCLSSNKFNCNTHTLISITKAIIVSKIDYGLVFYGNSSITWLKKIQTILNCAVRIALGAFRTTPITNLLMEANINTVADRRDFLQAKLIKNLYFPNNSPLHKISKSLQSRIHFNNKIPSAITYSLQHCKKQNISLLIKPEIKTKLPFWKFQPNTINTELEKLDKNNTHDSIYQQHFLTIKNQFNDHTFLFTDGSKTISTTSFAITTEKNTLKVGLLQNFSSIYSAEIIAIFEAIQIVKSMRGKYMICSDSLSSLQAIGNPDNFNYYESKIRSLLMQLHPKIKLLWIPGHKNIKGNELADQKAKSASTMPLTYTHNNNISDINKHLKTKMLKDKLIKLEQTSNWYQFINPNQITADKFTKRLDQNTTSRIKQTKIIRLRLGHTRITHQHYLDPTKINTCTHCLNNVPVTIEHLLKDCPSSQLTDIRFKIFANNNPLTFLSNPTKTEIDLIIKYLKETNLYPLI

SEQ ID NO: 2452 - protein, 1008 aa, synthetic construct
  source 1..1008: note = Description of Artificial Sequence: Synthetic polypeptide
MSLRVLQLNLHKSKVASAELLIAMEQGSADVALVQEPWIASGNAVAGLKSSNYNAFYTPSVSRNRTAVLVRKGLQANLMSHYSSDDLTVVLLESKKKRLLVASCYMAHDRPAPPEELRSLVEPGPKDQQLIVGADANAHHSVWGSPDINDRGESLLDFILSTNLYIANVGEEHTFVGPTSSNVLDITLVAGQSTMVSDWKVLERPSFSDHRYIQFQCEFDHSPKPTVFRNPRNTNWGKFQDIISRKLATSPGTVKSDEDIEKSLETLSKELLGAYHASCPISRSKKRTRPPWWNKDLSLQRDDLREFFKLAKQAKDDIINEEYKILLRNYKKEIRRAQRSSWRNFCSNIETAPETARLRKLLSKQPTIQSQLKRDDGQWTEGSEEALTALMHGHFPGCTKITNTHPAISFWIGNLLSCRRVQSDWGTASMVKGAHRGTPQGGVLSPLLWNLVVDDLIRRFERKAPKITAYADDISIIITGVCPSTLSSIMESTLREICEWTDKVGLSINADKTDLILFTKRYKVPPWIPPKINTTRLTPKTQVKYLGTVLDSKLAWKPNVLERVKKATIALYASKKMLSSTWGLSPALMHWVYISVVRPTLLYGVLVWWQAMEKRTYKKLMERTQRQALLCISGALRSTPTKALETIIGIDPLDIHAQLTAGKAAQRLVALGSMSTKGYGHSSIGRTMSSVSDYMTPRTCPDVKTSTFMGPEDWKTVQDHARYLNIYTDGSKMEGGVGAGIYCTDPETRLSYKLPSHCSIFQAEVFAIRKAAELAQEIARPCEAVNLFVDSQAAIRSMQSSAVSSKNVLASRDALDILSTTTSVRIYWVPSHQGIEGNEIADELAKEGVGLAIDRTENVPVSLRTLQSELERRADVRAKSRWRGNSATCKTSKIMCKERNDKLSHYVLHLSRKDCRLLVGLLTGHCLAAAHAVKLGITNNGNCRKCDESEATETLEHLICKCPALTQARVKHLGAPVLASLADASKRSPGELLAFAKTTAILKDFNTA

SEQ ID NO: 2453 - protein, 1734 aa, Murine leukemia virus
MGQTVTTPLSLTLEHWGDVQRIASNQSVGVKKRRWVTFCSAEWPTFGVGWPQDGTFNLDIILQVKSKVFSPGPHGHPDQVPYIVTWEAIAYEPPPWVKPFVSPKLSLSPTAPILPSGPSTQPPPRSALYPAFTPSIKPRPSKPQVLSDDGGPLIDLLTEDPPPYGEQGPSSPDGDGDREEATSTSEIPAPSPMVSRLRGKRDPPAADSTTSRAFPLRLGGNGQLQYWPFSSSDLYNWKNNNPSFSEDPGKLTALIESVLTTHQPTWDDCQQLLGTLLTGEEKQRVLLEARKAVRGNDGRPTQLPNEVNSAFPLERPDWDYTTPEGRNHLVLYRQLLLAGLQNAGRSPTNLAKVKGITQGPNESPSAFLERLKEAYRRYTPYDPEDPGQETNVSMSFIWQSAPAIGRKLERLEDLKSKTLGDLVREAEKIFNKRETPEEREERIRRETEEKEERRRAGDEQREKERDRRRQREMSKLLATVVTGQRQDRQGGERRRPQLDKDQCAYCKEKGHWAKDCPKKPRGPRGPRPQTSLLTLDDQGGQGQEPPPEPRITLTVGGQPVTFLVDTGAQHSVLTQNPGPLSDRSAWVQGATGGKRYRWTTDRKVHLATGKVTHSFLHVPDCPYPLLGRDLLTKLKAQIHFEGSGAQVVGPKGQPLQVLTLGIEDEYRLHETSTEPDVSLGSTWLSDFPQAWAETGGMGLAVRQAPLIIPLKATSTPVSIQQYPMSHEARLGIKPHIQRLLDQGILVPCQSPWNTPLLPVKKPGTNDYRPVQDLREVNKRVEDIHPTVPNPYNLLSGLPPSHQWYTVLDLKDAFFCLRLHPTSQPLFAFEWRDPGMGISGQLTWTRLPQGFKNSPTLFDEALHRDLADFRIQHPDLILLQYVDDILLAATSELDCQQGTRALLQTLGDLGYRASAKKAQICQKQVKYLGYLLREGQRWLTEARKETVMGQPVPKTPRQLREFLGTAGFCRLWIPGFAEMAAPLYPLTKTGTLFSWGPDQQKAYQEIKQALLTAPALGLPDLTKPFELFVDEKQGYAKGVLTQKLGPWRRPVAYLSKKLDPVAAGWPPCLRMVAAIAVLTKDAGKLTMGQPLVILAPHAVEALVKQPPDRWLSNARMTHYQAMLLDTDRVQFGPVVALNPATLLPLPEEGAPHDCLEILAETHGTRPDLTDQPIPDADHTWYTDGSSFLQEGQRKAGAAVTTETEVIWAGALPAGTSAQRAELIALTQALKMAEGKRLNVYTDSRYAFATAHIHGEIYRRRGLLTSEGREIKNKSEILALLKALFLPKRLSIIHCLGHQKGDSAEARGNRLADQAAREAAIKTPPDTSTLLIEDSTPYTPAYFHYTETDLKKLRDLGATYNQSKGYWVFQGKPVMPDQFVFELLDSLHRLTHLGYQKMKALLDRGESPYYMLNRDKTLQYVADSCTVCAQVNASKAKIGAGVRVRGHRPGTHWEIDFTEVKPGLYGYKYLLVFVDTFSGWVEAFPTKRETARVVSKKLLEEIFPRFGMPQVLGSDNGPAFTSQVSQSVADLLGIDWKLHCAYRPQSSGQVERINRTIKETLTKLTLAAGTRDWVLLLPLALYRARNTPGPHGLTPYEILYGAPPPLVNFHDPDMSELTNSPSLQAHLQALQTVQREIWKPLAEAYRDRLDQPVIPHPFRIGDSVWVRRHQTKNLEPRWKGPYTVLLTTPTALKVDGISAWIHAAHVKAATTPPIKPSWRVQRSQNPLKIRLTRGAP

SEQ ID NO: 2454 - DNA, 195 bp, Acropora digitifera
  source 1..195: mol_type = unassigned DNA
taatttattcacaacttcatgtgaccatatcttcaccaatggcaaagctcctctacactctcatataaaccacaacaacccacaattcctctattcgctctgacgaagggctaacgctcgaaacgtcagctttctaaatctttcacggtggtaattcaacctttatcaactcgtttgataaaaccaaatttttgt

SEQ ID NO: 2455 - DNA, 228 bp, Acropora digitifera
  source 1..228: mol_type = unassigned DNA
taatattgttacctcttatcatgttatttcattattttttcaccttatacttatctttagtttacactgtcaattatttttacttatttccggttattacaaaatatgcaacataaaaatcacgtaccaatgtaaaattctcattgtacctgaagaaggctggtttggccagccgaaatatagtacacctacaaaaaagatccttctacgttgtgtcgacttctgctt

SEQ ID NO: 2456 - DNA, 317 bp, Acropora digitifera
  source 1..317: mol_type = unassigned DNA
tgatttactctcacagtactgcccaacgtattctacgatacacgtactgaccttagacctgtagacggatcgaaacgcaccaatcactgtttagtctttccagccaattacatctaggctcaactgacagtcgaccaataacatcacgaataagttgaccaattacatctacgaccggagtttttatagtatctactgacgttacacaaatcacttgactctgaagatgacttccgctcaggttgtcgaaacgtcagtcaatgtcatctcaaacagtccttctcaggactacactcacccggacgatcgtactttac

SEQ ID NO: 2457 - DNA, 237 bp, Aedes aegypti
  source 1..237: mol_type = unassigned DNA
tgatcctgcccaatatgacgacgacattgatgccagcccacggatacgaaactgttttactaaattgtactatgtatagatgtaagcttgaaatgttagattgacagttatctccttttcatcggttcagtcttctgctgaccgtatttctccagggtctcagccttctgctgagccttctcccgtgttgaactagcataatgttaaaaaacacgttaataaagatgaaaaaaaaaa

SEQ ID NO: 2458 - DNA, 18 bp, Aedes aegypti
  source 1..18: mol_type = unassigned DNA
taagtaagtaagtaagta

SEQ ID NO: 2459 - DNA, 345 bp, Aedes aegypti
  source 1..345: mol_type = unassigned DNA
tgaatacataggtagatagttagggatttgtataattattattatcccccttttcaatttttgaccaagacatgacaggtatactcctgtcgaaaattttttcctaggtagtttgattgtgtaggtacttatctggtgttagtatttaaggtagagagatgcgacgatttcttcagtggatacgagtaactgacactgaagaagactgcaagtggtagtcgaaatacgcgtatctgtcaaagataagcatttaggagcggaattaaaaggtacacggtactccatctactttaaagtttctctattcgagattctgctcagaggattcgaacattcattaaagag

SEQ ID NO: 2460 - DNA, 123 bp, Aedes aegypti
  source 1..123: mol_type = unassigned DNA
taatgtatcctgttaagtgttgtccaagagttgatgcttagtttagtttagttttaattttattcattaagaccatgatgtcggatgaatcttcaatacaaatacaaatacaaatacaaatac

SEQ ID NO: 2461 - DNA, 476 bp, Aedes aegypti
  source 1..476: mol_type = unassigned DNA
tagtttgggccccgtatcactctgtacacatcaatcgacttgaacgagttcaaaaaagttttattaggtatgcactccagagactaccttggcgaaataggatgctgctgccgccatacgagcatcgctgtgcactcgtcgacttacctacactacgcaacaggagaactcttctaaagcagcttttcatttttgatctgctcgaaaataacatcgactgctctggtctgttaggcaaattaagtttcaacacccctgtgaggctcctacggaggactgcactattccgacacgctgctcatcgaacgttatatgggcaaaataatccgcttgatgtatgttgtgaaatgtttaataatgtgtatcacttgtacgattttaacatagctaaggaaacatttagattaaggattctacggaattgaagtctgtgcgatgtatttttatttaaatcgaagaccaaataaatcaaatca

SEQ ID NO: 2462 - DNA, 432 bp, Aedes aegypti
  source 1..432: mol_type = unassigned DNA
taatatgcattttttctaatgccacttccgtatctgttctttgtcattccacgccaccaccacccttcgccaccacccaccgccagccaccaatcaccaccacccactgctagccacccgccgccagccacccgccgccatcgccaccattcatcacttcacccatcgcttgccaccaacttcagtaaagatcaatgctcataaatatttataatgtgaattgaaagtttgtgaaaattctaaactatagcgcttccttcaaagagctacgctcattggaagtgcagttatcgctcaatcgttgaattatacttatttttttgaaaagatgagaaggttttatgcctatgggagaagtggcttaaagtagctacactctcacgggcttttcccttctccaagagaaaaaaaagcagtaaataaataaataaa

SEQ ID NO: 2463 - DNA, 115 bp, Aedes aegypti
  source 1..115: mol_type = unassigned DNA
tgatttttattgtgtacttgtttttatatatcttgacctattttgtcgtaaatttaagtaaccacacatcattgggactaattgtctgttggtgtaaacaaataaacaaaaaaaa

SEQ ID NO: 2464 - DNA, 145 bp, Aedes aegypti
  source 1..145: mol_type = unassigned DNA
tagaacattcaggaaaatcgaattcaggaacataattcgagttagttaaatagttttaatggaatcaccacagtgtaacatttcaagaaggagtttccttacgttacataaattcaaataaagaaataaataaaataaataaata

SEQ ID NO: 2465 - DNA, 71 bp, Aedes aegypti
  source 1..71: mol_type = unassigned DNA
taggatttagtttcaattcatgtagacaaaagtcagatggataatatacaaatatacaaatatacaaatat

SEQ ID NO: 2466 - DNA, 149 bp, Aedes aegypti
  source 1..149: mol_type = unassigned DNA
taatgttgttttatgttgttgtatttttatcgttgattgtaattttgttagtaactgcttcatatttgttaaactagaataagatatacataagttatacatcattgggacctgttttgtctgttgatgtcatccaataaataaataaa

SEQ ID NO: 2467 - DNA, 107 bp, Aedes aegypti
  source 1..107: mol_type = unassigned DNA
taatttttgtaatcttggtttgaatattttagtgtttgtattttgtttaagaaacaagggtcattggggtaatgttttacctgttgactaataaataaataaataaa

SEQ ID NO: 2468 - DNA, 63 bp, Aedes aegypti
  source 1..63: mol_type = unassigned DNA
taacagtctggcggattaaggtattgatccaagacgtagcaattaaataaataaataaataaa

SEQ ID NO: 2469 - DNA, 72 bp, Aedes aegypti
  source 1..72: mol_type = unassigned DNA
tagcttaagaaacagtctgtggaatgtaacaattcgagacggtgacaataaataaataaataaataaataaa

SEQ ID NO: 2470 - DNA, 94 bp, Alligator mississippiensis
  source 1..94: mol_type = unassigned DNA
tgatctcagcagtattcctgcccagagcaggggggttggactcgatgatctttcgaggtcccttccagcccttaatttctatgattctatgatt

SEQ ID NO: 2471 - DNA, 96 bp, Alligator mississippiensis
  source 1..96: mol_type = unassigned DNA
tgaccccagggttggtgactcttttcttgcctgccaggggcagggggtcagactagatggcccactgaggtcccttccaactctatgaatctatga

SEQ ID NO: 2472 - DNA, 27 bp, unidentified
  source 1..27: mol_type = unassigned DNA; note = Description of Unknown:Amborella trichopoda sequence
taattgggaaaaggctataatgatgat

SEQ ID NO: 2473 - DNA, 331 bp, Anguilla japonica
  source 1..331: mol_type = unassigned DNA
taaccaccaccattctgtatatttcactctttaatttaaaaaaaaaacaaaaaaaaaaaaaaaaaccccccccccctttttcatgtcacttgtatttgtctttgtcctaatactgtagcttactcttctgcctagttggctttgcacaggttaggttagaatagtgttcactgtgtgaactgtgttcttagctagaaatagctgtacaaaataagtattatacctttctgaacttgtgttcagcagatgcctacgaccatgatatgcacttttgtacgtcgctttggataaaagcgtctgcgaaataaatgtaatgtaatgtaatgtaatg

SEQ ID NO: 2474 - DNA, 84 bp, Anolis carolinensis
  source 1..84: mol_type = unassigned DNA
tagacacttgggaagtgtccgacgtgtgatccaatacaacagccagcagagtgtctgctgtggactcatcttgttgtgtttcaa

SEQ ID NO: 2475 - DNA, 172 bp, Anolis carolinensis
  source 1..172: mol_type = unassigned DNA
taaatcagatctaatttgccaaatagtcactgttgaatgtttttagttgaatgtttttatgttgaatgtttttatattgtggaatgatattttaaattgtaagtcgctcggagcactctggtggagagcgactaattaagaaataaagtgaagtgaagtgaagtgaagtgaa

SEQ ID NO: 2476 - DNA, 126 bp, Anolis carolinensis
  source 1..126: mol_type = unassigned DNA
gcttttcaatgctaattaaagtgattaactacacaacattcacactgacctctctcaccctagactttccacagatatatattaacctctttgcttagttttctccatacctcacaacctctgagg

SEQ ID NO: 2477 - DNA, 109 bp, Anolis carolinensis
  source 1..109: mol_type = unassigned DNA
tagtattaatgccaagtttttgtttttttttcttaaaaaaaatctctatgtttgcaaatccattacaacttgtaccctcggtttcgcttctgacacgagaaataaataa

SEQ ID NO: 2478 - DNA, 103 bp, Anopheles gambiae
  source 1..103: mol_type = unassigned DNA
taaatgttctgttcgttatctaatgtaatgtattgtaaacaaattttgactcgagagggcttcatagtccatcgattaataaactaaactaaactaaactaaa

SEQ ID NO: 2479 - DNA, 253 bp, Anopheles gambiae
  source 1..253: mol_type = unassigned DNA
tcctttataatccttttccctgatactcttccctatcctcttttttctcatcctcttttttccgactatcatatctaatattattcactcttcttttcttacgtttgtattttatcctaatatctgtctttcatgtgctcaaaagttcgctttagtattaggaatttagataggttaagttaggaattagttagatttaggaattgtgaaaccatcaggctgacaatttgaataaacttgaaatgaaatgaaa

SEQ ID NO: 2480 - DNA, 160 bp, Anopheles gambiae
  source 1..160: mol_type = unassigned DNA
taattttattttcaaaatacattttctattcttgtgcacctgttctcccctatcgatttatgtaccttacatagtctataagcactaatttaagtacattcatgtaggatcttcaagatcccgatggattaatcaataaacatattaaacatattaaaca

SEQ ID NO: 2481 - DNA, 13 bp, Aplysia californica
  source 1..13: mol_type = unassigned DNA
tgatgatgatgat

SEQ ID NO: 2482 - DNA, 106 bp, Aplysia californica
  source 1..106: mol_type = unassigned DNA
tgatttgtctagcctgcacgcaatgcattattgtcgttcattaccagatagttgaacaggctctacttagagcctcaaacaactaaatcgtcaatgtcaatgtcaa

SEQ ID NO: 2483 - DNA, 197 bp, Aplysia californica
  source 1..197: mol_type = unassigned DNA
taaagttggcagcagaggaaaacagtcgaactaacatggagacctcacatcggtgagggggctcggtgcgtcagaaaagctgtagagaggaagagcccgaaacagcgacgcattctctcctgatgatctccatgctagagtccgggatacggagcgttcgacggtgagcagtgcatacggctgtttagactacgtac

SEQ ID NO: 2484 - DNA, 653 bp, Aplysia californica
  source 1..653: mol_type = unassigned DNA
tagagacacttgagagtgggactgatgtgaacaaagatatattgcacttgatttggagtctacataatttgataagtaggcaccacgtcagagtagtcctacaatggattcctgcccacactgggataccgggaaatgaaagagctgatgctctggcaaagaaaggagctagcctccctcagcctgaaattcctacgaattacaccacctgctgccaaatgatcaagtcaaacctcaaggaagagtggatgaatgattgggccacaggtacgacaggaaggaggatgtatggccacatgaataaaccactggtcaaagatccaatcaatgagttgaggaggggagatcaatccataatcttccaacttagaacacaacatgtacccctcaaccaacatctcaaccgaattggagtaaagcagtctgctgcctgcccactatgtgactacccctcagagacagtggaacatcatctgttcttctgtagaaaactaactgatttaaggggatgttttcttcccaagctaccccacacatctaattgcctctactcctcaagacaacaattagaacaaacatgcaactattaccgaatggcatcatgcagaagagttaacgctcagatgctactggatcgctaacaacaacaacaa

SEQ ID NO: 2485 - DNA, 10 bp, Aplysia californica
  source 1..10: mol_type = unassigned DNA
tgatgatgat

SEQ ID NO: 2486 - DNA, 25 bp, Aplysia californica
  source 1..25: mol_type = unassigned DNA
taaagggatttgaaaacaacaacaa

SEQ ID NO: 2487 - DNA, 19 bp, Aplysia californica
  source 1..19: mol_type = unassigned DNA
tgagaaaggcaatgatgat

SEQ ID NO: 2488 - DNA, 46 bp, Aplysia californica
  source 1..46: mol_type = unassigned DNA
taagctaaattgaccgtctgcatagacgaaaagagccatatatata

SEQ ID NO: 2489 - DNA, 99 bp, unidentified
  source 1..99: mol_type = unassigned DNA; note = Description of Unknown:Blumeria graminis sequence
tgaaggttgacagacttctcccagtagcaaggaagtggacggtatccgcactggacatgacagtgatagtgcacttcttgaaggtaacacaacatcaaa

SEQ ID NO: 2490 - DNA, 183 bp, Caenorhabditis sp.
  source 1..183: mol_type = unassigned DNA
tgatttctcttgtctttccctttcttcacttgtcgcttttgtttgacctcccattcgctccattttaggcatatcccccgtttctctttctcccccggtgaggcctcgtgaggggcacttgccaggttcttctgatgtatcatattgatttttccctcttttggaaataaataaataaataaa

SEQ ID NO: 2491 - DNA, 36 bp, Caenorhabditis elegans
  source 1..36: mol_type = unassigned DNA
tgaagaacggatcgtctaagtatctaagtatctaag

SEQ ID NO: 2492 - DNA, 40 bp, Caenorhabditis elegans
  source 1..40: mol_type = unassigned DNA
tgaaaacggcgctgcgccgcctgttgcacaacaacaacaa

SEQ ID NO: 2493 - DNA, 256 bp, Caenorhabditis elegans
  source 1..256: mol_type = unassigned DNA
tgatctaatgttaccttatcctcacttctatccatcatttattcttgccttttatacatcgatatttgtgttttttgcttcttctccaatgtagccattattttcttctcatctcttttttatttttgttccgttttatttatgtaatttatttatgtaaccacttgtgatggtttgtatctatttatgtgtgttttttttctacctcacgatatcttactatcgtaataaattaaattaaattaaattaaaactt

SEQ ID NO: 2494 - DNA, 59 bp, Caenorhabditis sp.
  source 1..59: mol_type = unassigned DNA
taacttaatgtaaaaattgacttgtattagtggctttgcccttcaatcaataaataaaa

SEQ ID NO: 2495 - DNA, 39 bp, Caenorhabditis sp.
  source 1..39: mol_type = unassigned DNA
tgaggtcgaacctcacaagtatcacaagtaagtaagtaa

SEQ ID NO: 2496 - DNA, 211 bp, Caenorhabditis sp.
  source 1..211: mol_type = unassigned DNA
tgaccactgatgaccgaacgtttacgcmaaatctatcctctcctctctcccaaaatktkttwwtttcacgtgtactctaaccacatatccctgcaaattcctctattcttgccactccgttttctttgawtcctcttstacacctcttctgtatttattacttttcacgtaccgcaatgggcgtatacaaataaataaataaataaataaa

SEQ ID NO: 2497 - DNA, 334 bp, Caenorhabditis sp.
  source 1..334: mol_type = unassigned DNA
taaattaattcatttcaattgtaggattgaaacatatttaatctttttttttctatttctatttgtttttcttcatacttattgtacatttttattgaatttttccccccttcatttacaaaattgtactgttttatctctttctctttcactatagcgcaattgtaatctagcttaaattatctccaacatgactttgtttgattattatcgaaggatcctcttgcggggtgatgtcgagtaattttatttattcattgtgccattcccacctctttctctgatctcgaaatgtttttttttctcaacccgtgaataaataaataaataaata

SEQ ID NO: 2498 - DNA, 183 bp, Caenorhabditis sp.
  source 1..183: mol_type = unassigned DNA
taaattttgtgcttgtgatatcatcccacccgtctttctctcatctatttgaccgcggatttttccaattggtcatcttacttatttattttctctccccttatttttataccgttgtcctcttttccatgtgccatatacatatttttatgcgagaaatgaataaacatattattattatta

SEQ ID NO: 2499 - DNA, 50 bp, Caenorhabditis sp.
  source 1..50: mol_type = unassigned DNA
tgaccgaagatcgtcaaggaatgagtagagttgcacaacaacaacaacaa

SEQ ID NO: 2500 - DNA, 43 bp, Caenorhabditis sp.
  source 1..43: mol_type = unassigned DNA
tgatcgaagaacggatcgactaagtaactaagtaagtaagtaa

SEQ ID NO: 2501 - DNA, 202 bp, Caenorhabditis sp.
  source 1..202: mol_type = unassigned DNA
taactactgctgaacggacgtcaccaagatcctttatcacttctaccccacctttttttttctgctctcattcttgatctgtttctacccaactccttattgctctcattatttccctgcacatacctttaatgtatctgtgtacacaatatcaacacgtcacattggcgtaaataaataaataaataaataaataaataaa

SEQ ID NO: 2502 - DNA, 170 bp, Caenorhabditis sp.
  source 1..170: mol_type = unassigned DNA
taattttttgtctacatagattttcctaacatctctttttaacttctttcgtttgtttctaaatcttccgtcatatcgtttcttatacgtgtgtaatagtttgttatttatatatgtgctgatgaataagtggcagctgcccttcaatcaataaacaaatacaacaaata

SEQ ID NO: 2503 - DNA, 231 bp, Caenorhabditis sp.
  source 1..231: mol_type = unassigned DNA
tagagcttattcttattctgtactcccaaaccacctttccccgcattaccacattgctcaattcttaatgccttcttttattcccctcataccggtcattctttttttttgttgccccacatctctcactttaacccaccctttgaatggtctcgtgagggactcattctcagcctcccgccccatatattgataattttttataagaataaaatacaaatacaaaataca

SEQ ID NO: 2504 - DNA, 70 bp, Caenorhabditis sp.
  source 1..70: mol_type = unassigned DNA
taaattataactgtttctttttttcttatttgtataagtggtgaaagtccttcaaataaataaataaatc

SEQ ID NO: 2505 - DNA, 361 bp, Capitella sp.
  source 1..361: mol_type = unassigned DNA
tagggcaactacaagatcttattcctatgtaaaacaccctagctactcttacactttttcttctctttcctatttgattagtcctcctagttcttctagctctatccccgctctttattctttaaccgttttgtgtctcacttatatgtttaccctgttttcggtactttctttaacaatttctatttcttttgtacttttataactttactgtactatgtttgtattattttttgtattgtattaccatcatgataatcattcaattctcactcatttggtggcatacatatgttacgttcagttatgaacttcgtatgtctcctgacccttgtcgaataaataatctatctatctatct

SEQ ID NO: 2506 - DNA, 95 bp, Capitella sp.
  source 1..95: mol_type = unassigned DNA
taaaatgtatcaaaataaaataaaataaaaggagctgatcgtaagaggctatttaagcctgaagatcagaagaggacctgtaagtacctgtaagt

SEQ ID NO: 2507 - DNA, 225 bp, Capitella sp.
  source 1..225: mol_type = unassigned DNA
taaaaagaagttaaagactttttttattcaataatgcttttaataacgcagaacagttttaagtggaaatgaacttggcttgtttttatgtttctatgatcttttatccaaatacattttcatatgttttattttgtgctttgaaacttttatgtattttaagcacttgaatataataacatttatttatttatttatttatttatttatttatttgtttattta

SEQ ID NO: 2508 - DNA, 161 bp, Capitella sp.
  source 1..161: mol_type = unassigned DNA
tgattttaccctaatttccttgacacatattctttgttgccattgtatttttttaagctggcagttcttataggttttcctgttctgccatgctgttgcatgcattgattttattgtacatattatttttgcatgcatgaagcttaataaataaaaaaata

SEQ ID NO: 2509 - DNA, 114 bp, Capitella sp.
  source 1..114: mol_type = unassigned DNA
tgatgtttacatgttccccctttttattttcaaattgtattagcgttctgagcatttttatggaagcgacgctttataaaataaattttcattttcattttcattttcattttc

SEQ ID NO: 2510 - DNA, 127 bp, Capitella sp.
  source 1..127: mol_type = unassigned DNA
taatgttattatcatcattaatggcttaattgtcatattcatcattcattttactcattattatctgtttggcaaaatcattccttcgggcgaataaaatcatcttatcttatctcatctcatctca

SEQ ID NO: 2511 - DNA, 101 bp, Capitella sp.
  source 1..101: mol_type = unassigned DNA
taatgattttcctttttacctctgtttgtacagcgcatttgaatgttctttgatattgctgaaaatgcgttttaaatgtaataaatgaaatgaaatgaaat

SEQ ID NO: 2512 - DNA, 89 bp, Capitella sp.
  source 1..89: mol_type = unassigned DNA
tgacatggctttgtgaagcgcatagaaatgcatcatgcatcatgttgcgctatataaaataataaattcaattcaattcaattcaattc

SEQ ID NO: 2513 - DNA, 366 bp, Capitella sp.
  source 1..366: mol_type = unassigned DNA
tagtatcatcctcgatctacaactaacatatgaaacgaactatttcactctgaatatgcgctgcaccacccactattttttcatttttttttctctccgcaccaaagctgaataaaattttaaattgcacaatttgaacaggcgactcacaagtagccatacttagtcgcctattgacatgaccctattctttttcgcttctgtatttccatttctctagtatgtatttccatatttcattgtcgcttcctgctttctttaccaacctccctttttctattttggcatcttatatttgctaatatttcattctttctgtcgtgtcaataaatgcaattcaattcaattcaattcaattcaattcaa

SEQ ID NO: 2514 - DNA, 26 bp, Capitella sp.
  source 1..26: mol_type = unassigned DNA
taaataaataaatataaattaattaa

SEQ ID NO: 2515 - DNA, 202 bp, Capitella sp.
  source 1..202: mol_type = unassigned DNA
tgattttattaatacgtcctcatactgtttttatcacttttgtgctcttaaaagtcgctcattttgtttttagtcacttttaattttagttactttgttcactttttatatccattcagtgttcatcttcttttactcagcgctattgagcatttttggattttagcgctatagaaataaattattcttattcttattctta

SEQ ID NO: 2516 - DNA, 251 bp, Capitella sp.
  source 1..251: mol_type = unassigned DNA
taattatgttcttttccatttatatatatatgcatatatatatttgtttatttgtttgtttgtttttttttttctcgtttttaaatttttttgtcgctctctctttgtgcaagactcgttaaaactattattttctctcttccttttctatgtacttttcatgtggcgcaaaagcgatcacgcttctgccactacgttattttcgcaccttttatgttgtgattgaataaaattattattattataaaaaa

SEQ ID NO: 2517 - DNA, 120 bp, Capitella sp.
  source 1..120: mol_type = unassigned DNA
taaatttcacataattttatatttcaatatgtttttcggactattctatgtgaagcgcatagcagtgttttaccttttgcgctatataaataaataaattgattgattgattgattataa

SEQ ID NO: 2518 - DNA, 82 bp, Capitella sp.
  source 1..82: mol_type = unassigned DNA
taaatattctgcaaatttatgacctgtcaagaggacctcctcatgacatgtactgaataaagttttctattgaaaaaaaaaa

SEQ ID NO: 2519 - DNA, 224 bp, Capitella sp.
  source 1..224: mol_type = unassigned DNA
taaaatccttcacaatcccccctgctaaaattatctatccctaacagctcatctcctaacgcttttgtgaatatcctgtttgttagtttgtttattcgttgtttgtttgtaaaattgtaaatatccattgcgggcacatacccatgttctgggtcagcccctctcactccacttgtgtttttttcttttctttttgaataaacacatttttgaatttgaattga

SEQ ID NO: 2520 - DNA, 710 bp, Capitella sp.
  source 1..710: mol_type = unassigned DNA
taacgagcagacgacgccacagcaccagtagcggccaactgagtgttacacaatggtatgacgctaattataacgcccacaccccacctctcttccaaaaaagcaatgttttacctttgcacagcctgatcaatatcgaaattgccaaatttatgcacctgcactcaaaaaatagtttaccacctcgactctctgctatcctagactcacatgctcaacctcatcagtacgccacacgctccatcctaccataccgtcctcccagaataacctctctagccactgcaaaaagttttttatctgaaggtatcagaatctggtcctccctcaaccctgaaactcgcgcacttccccctcgccgcttctccaagcaactaaaacgaaaatatctgaatgaactcaccacctctctctaacttacacatgtccatcaccattttttttctctctctctctctctctctctctctctctctctctcctcctcctcctcctcctcctcctcctactcctccatctacattgtttttgtttttttttctttttgcttgacaaattccccaaaagtttcaatctgctttatttggccccctggccccgtacagacgtttgtgtctcgccggggggcctcaggtcacgtttaatgtccaaatttataataccctgtaatattctgccctgaaataaacattcattcattcattcattca

SEQ ID NO: 2521 - DNA, 163 bp, Chlamydomonas reinhardtii
  source 1..163: mol_type = unassigned DNA
taacatcctggcggggtgcaggcctggcctgcacgcccgccttcacatgctcggtagtgggggcgtacaggaggcgggcctggcccacctcctcatctccccccactcccttaatccacaccacttgcctacggcagggtgtctctatttctatttctatttc

SEQ ID NO: 2522 - DNA, 375 bp, Chlamydomonas reinhardtii
  source 1..375: mol_type = unassigned DNA
taatttgctcgtgggtggtgggagcggtgtgcctctggtgtgtgcgctgtgggtgtggggcgtcgacgtgggcgtcgccggactacgtgcccggtgtacctgcgttgacgcctcgccggtttgattgcgcctcgtgcgctagtgcggtttgctgtacgttggtggggctttggcgggcttgggcttagcttcgactcgctgtgcagctgccgagacacgctttacgcgaagacctgttgcacggttgtggaaggtcggtagccaactggggggagggtggtttcctttcgggccggagatggtccctcttgacctgggtgcacgggcacccttgcttggtcggattgtcccttctttgtaatatcgcaaccataa

SEQ ID NO: 2523 - DNA, 141 bp, Chlamydomonas reinhardtii
  source 1..141: mol_type = unassigned DNA
tgagccacggctcccccacacctcctcggagtgcgtggtgaggtggcagcgcgagggggatgggcctcctcgccctagccaccttaccccgataatccacgccaggccccatgggccggcgtttgaattattattattatt

SEQ ID NO: 2524 - DNA, 392 bp, Ciona sp.
  source 1..392: mol_type = unassigned DNA
taaatattataccgtaactgtccaatgccttagcaatattgtaacttcattaatttagattttccatacctcgatctctttaacacattgtaaatcactgttatatattcattatgcattttgtttgttttctttttttagggttttgttaaagtttttttgtcattgtaacgtttttgcacaaatttttcacactgctattctgtttatttcttatttatttatctttatattttaatttacatttattataaggtggcacctgcttcgataaccgcatggtttctcggtgtctccttgttaaacttcagtttaatttattttcgtattgtttattattttgttttctgtgcgtttaacaaataaaatatgtttgattgattgattgattg

SEQ ID NO: 2525 - protein, 29 aa, Betaretrovirus sp.
DMGALQPGLPSPVAVPKGWEIIIIDLQDC

SEQ ID NO: 2526 - DNA, 326 bp, unidentified
  source 1..326: mol_type = unassigned DNA; note = Description of Unknown:Copidosoma floridanum sequence
taagcgctggcttgttgttgtaatttattgtcagtcgatagcacgacaggtgacgagtaagtcaaccaaacttacgaattctcgcgtacctgcggtaacaatttacatcaaaatttattgtattttgtgtttgagccttccagatcactcattgtgtgtttttaattttaattttgtagcctgatgaggctgacgcatattgtcagcgaaacgttgcgcattaataaatcaacgcaagaaaatttaaatacactttacttgtatttatttattttctcacatttcgcccccaacggatcactgatcactttgaatttccaaattca

SEQ ID NO: 2527 - DNA, 492 bp, unidentified
  source 1..492: mol_type = unassigned DNA; note = Description of Unknown:Copidosoma floridanum sequence
taaattaatatttgtgtttttatatcctttattgtaatttgaatttatcgcgcgttttcactgtatagattgaatatatatgtaacacatgttggtttcgtctatatatgtatgtaaaatttgtatttgataatttgaatatgtaaggtcagtcgactatgtgccctcgttgggtactgacgttgtttgaatcttcgaacaaaataatctttttgtaagtctctaatttgtaactgtatttaaaattgtttattattgttcttagtttttaaaatgttattagatgtgataacgtggatgtattgttacctcaagttaatttatttcgtgtatattttataaaattaggacttgaaaaggctcctacccaaagaggagagaaacgtcgtcaggggatataataaaaaattatatacaacagcaatagccattggttttattatttgatgaatttcgtcttgctcgctgttgttggagtcataaacatcataa

SEQ ID NO: 2528 - DNA, 520 bp, unidentified
  source 1..520: mol_type = unassigned DNA; note = Description of Unknown:Copidosoma floridanum sequence
taacaattttcataatttgataattcataacaatttatatccatcaatctctttttatcggttagtggccactttccttgatattgagtttgattctttaaagtaaaaataaacttagtttcataaattaccgctgattttgtactacaccaggttcaccactgttgtagtactacacacacatgttctcacgtagctttaaaaagaattcccatatattgtactatatcgcagttgagtagaataaacatctcacattgacgacactctgcgattattgtttaatattgtaagtaaagataaaacttttatacattgttagtgcgttttctgttgtgtacatctttatatacatatttatattaccattgctgtatattaatttttagtgacttgataaggactgccttggagtagtcgaaacgtcgttttttaaaataaagtcaatttgaacagcatagcccttagtacttgtcattatttattgtattattagctgttcttggaatcaaacaatatc

SEQ ID NO: 2529 - DNA, 553 bp, unidentified
  source 1..553: mol_type = unassigned DNA; note = Description of Unknown:Copidosoma floridanum sequence
tgacgagtgttgcttgataggtgtgccacttgatggccacgtttctgttggtccgtgtttccttgtacatacattgaccgtgggtgcacccttatgtggtgacaagaccttaacaccatattactatttttaatatcttccagttacatgtgctgagtcaggatgtgacttatattgtagataacttaactgtacatacattttgactgataaagtttataatattaagattatttaattattagtattccattgccgtggttatgactgactagtctttatcagtcatgctgcgtttggcattttcatgttcgcatctgcataggtgacttatattttcatttaatgtaatttgtcataatgttttttatattataaatattgtaaattgtacagttccctgaagagggagtcaggatgactccgaaatattggatcacattgtccaactaatatatgaaataaatagccatgctccaagattccaagttttttcatttaaatttccttaattatggcaaaggagcaagaagacagtagttttattatcaaa

SEQ ID NO: 2530 - DNA, 264 bp, Crassostrea gigas
  source 1..264: mol_type = unassigned DNA
taatttattcattcsaggatatacactttgatgtaacattgtgatttaatatgtaccataacccaaatataagttaataattgatacaccttgtataacgcgtgatgaactataattgttaatattaccaaggtgacttataggcccaatgggccgggtgcccaatattcatgtacaagtagttgttataaaatttgtatcatacggcacaattgtacataatatgcacatgtcactataataaataatttacttacttactta

SEQ ID NO: 2531 - DNA, 256 bp, Crassostrea gigas
  source 1..256: mol_type = unassigned DNA
taaattcctttttgcttttgctttctatactgtacattaacgttatctactatatatttgcaattactttgtaaatgtatgtctatgaatttaattattataaagtcaataactataagtaacatgtaatattacatgtactatgacaattgtatatattgtatgtattatcattaggagaggaacttgtaagttgtaagaacttgtttccgatccttttgtgttacttacacaataaaatatgttcaaatcaaaa

SEQ ID NO: 2532 - DNA, 110 bp, Crassostrea gigas
  source 1..110: mol_type = unassigned DNA
tgattatgtacactttgtttttcttactgtttatttaatatgtatatgttcatatgtataacctatgagacatttgtctcttggaataaagaacttgaacttgaacttga

SEQ ID NO: 2533 - DNA, 293 bp, Crassostrea gigas
  source 1..293: mol_type = unassigned DNA
taatcacaaatctgagtatttttgttgataacattttgcttatttttatttatttatctcgttcatccttgcatacatgtaacattaagtagataacattaactttcttattactacatttatcaaatatctacgtactggtgtaatttattactgtataagtacaaactgagacgtatttgcaataatattgtatttgttgtttaacatgtagggagagggcgaattaagtttttataacttgtgcccaatcccattgcaatatataatgcaataaaatatgttcaaatcaa

SEQ ID NO: 2534 - DNA, 228 bp, Crassostrea gigas
  source 1..228: mol_type = unassigned DNA
tagaccataattaatcacctaattgtctacggacttttccggtttttttcccgattacgacaaagagcacacggcgggtgtgaccggtcagcagaggatgctcactcctcctaggcacctgatcctacctctatctatttggaggtccgtgttgctctgctttgaatttgtatttcgttttatggatttttgagatggttgacggtttgttattgtcattttttcatt

SEQ ID NO: 2535 - DNA, 144 bp, Crassostrea gigas
  source 1..144: mol_type = unassigned DNA
taatatgtgtatatttatgttataattgtatttgcagtgacatataggcccaatgggccgggtgtttcattatctattttgtataacattttgtaattgttataacacatgtcactataataaattatttacttacttacttac

SEQ ID NO: 2536 - DNA, 175 bp, Crassostrea gigas
  source 1..175: mol_type = unassigned DNA
taactttagatgttgttcttttttgattcttttcgcctttacttatgtcaatttttcatatttatgtatgtacaatgtaatagggtctcctgtaaaatacccacttctgtactttactatgtttaatttgtaaaatctgatgagctgcaaagcttaaagaaataaagaatgaatg

SEQ ID NO: 2537 - DNA, 401 bp, Crassostrea gigas
  source 1..401: mol_type = unassigned DNA
  misc_difference 170: note = a, c, t, g, unknown or other
taaaatgtgtttataatagctgcaaggaaattgtaagcaaataatgacaaaaaaatataagtctacttttatgtatcctcttgcatatgtatgagtttttgatagatagtgttcccctctctttctccaccctctttcacccccccccacctcataactaaaaatactcnaactttcatgggtgataaaagcaagttttcgagattgtttgtgcatatatatgtctgtctgtcggtgtatacacctgtctgtacgtgtgcttttttatgtgactgtgtttatattatacttatattctaaatctcaaatgaagtgaatatgtgatgtgtatgcactgtaaactaaacatataagaagatgtaaataacttgtacatgaaagtttgaataaaaaaaaaaaaa

SEQ ID NO: 2538 - DNA, 192 bp, Crassostrea gigas
  source 1..192: mol_type = unassigned DNA
taagcgtaaatcaagtttatatataactactgctttgttgatctttttgatattttttcatccactttataccttttatatatatttatataacctgcctcccacctgtacccacaattattgtaaagtactgttaaattgtatgctatggcaatgtatgtaatgtatacgccaataaactactactactac

SEQ ID NO: 2539 - DNA, 209 bp, Crassostrea gigas
  source 1..209: mol_type = unassigned DNA
tagttgttttcctattatgatcctttatactaaaatctaacataagtagtgattctatagtctgttcttttttatttatattttttccctgtatgaaaatgtacctgtttgtctgtacctctgacgatttgtatttgtatgtattatatatatgttcctcttgtaccaaattatttggtctgagtgaataaactgaacttgaacttgaa

SEQ ID NO: 2540 - DNA, 207 bp, Crassostrea gigas
  source 1..207: mol_type = unassigned DNA
tgatcttataactactagtacaccgttgtttactatatacatgtcaattgcatatatgtatacgtccattctatccactgacctttatttatgttgtgtacacatattttgtattatatctttgtattgggagagggcggtctaagttatggaacttgtgcccaatcccaattgtatttttgtacaataaaaatatgttcaaatcaa

SEQ ID NO: 2541 - DNA, 426 bp, Culex quinquefasciatus
  source 1..426: mol_type = unassigned DNA
tagaagtgacccacgatggtactgtgacgaagagcacgttatgacggtcggccatcttcattatcggtacacatcgcatgggatcactttgggccgcatatgataaatttattcaaaagtaacgcgaatctgggcgcggtttaaccctatgggctcatatgtgcgtggaatagcaaatggttccaataccctaaatggataaaaatactgcaatctgattgataaaatgactcgacactggatttgttagagcgccttgagataggacacgagagaaatggatgggcatacacggaagtagagtcaagattacaggacactctcaaaacacgaacgacgaattatcgaaagatatctgctcgtaaaccttccatgctacaaaaactgtgtatgggtaagaggtgggccatccaaggaaaaaaaaaa

SEQ ID NO: 2542 - DNA, 63 bp, Culex quinquefasciatus
  source 1..63: mol_type = unassigned DNA
taaatttagttttaagtkcatcattggggcaaaataagtgcctgttgagaagaaataaacaac

SEQ ID NO: 2543 - DNA, 66 bp, Culex quinquefasciatus
  source 1..66: mol_type = unassigned DNA
taatgttagttttttaagattatacagcctgagcattttagatggaggcggtgaaataaataaata

SEQ ID NO: 2544 - DNA, 121 bp, Culex quinquefasciatus
  source 1..121: mol_type = unassigned DNA
taatctgtttttgtgtttcatgttgttagcatttgtctttagttaagttaagttttatcattaagaccacaagttgtcggatgattcaaataaacaaataaacaaataaacaaaaaaaaaa

SEQ ID NO: 2545 - DNA, 72 bp, Culex quinquefasciatus
  source 1..72: mol_type = unassigned DNA
taatttatgtattagtttgtaaggtaaaacaccattggggcccgagcctgttggtgtccaaataaataaata

SEQ ID NO: 2546 - DNA, 13 bp, Culex quinquefasciatus
  source 1..13: mol_type = unassigned DNA
taagtaagtaagt

SEQ ID NO: 2547 - DNA, 98 bp, Culex quinquefasciatus
  source 1..98: mol_type = unassigned DNA
tgatgaagtctgcaagtagtagacgaaatacgtatctgtcaagatattaaaaatatatagcggaattaaaaggaacaactcgtctctttgtattcaca

SEQ ID NO: 2548 - DNA, 54 bp, Culex quinquefasciatus
  source 1..54: mol_type = unassigned DNA
taagttgtagtctgtgcggcgagtgccgaagatgaaataaataaataaataaaa

SEQ ID NO: 2549 - DNA, 232 bp, Culex quinquefasciatus
  source 1..232: mol_type = unassigned DNA
tgacaaaggtttagaccggtttatttttagtcagttttatttatttatttatttattttttacattgtgctagtttagtttgwtagcttaagtttgattgtatatatcctctatgtcatttggattgtaaaatctgttgataataaaaaagaggttttgtgcctatttgagaaggacccatcggtaggcgttccactcaaacgggcttttccctcatataaaacataaaaca

SEQ ID NO: 2550 - DNA, 299 bp, Culex quinquefasciatus
  source 1..299: mol_type = unassigned DNA
tgagttttgttttggtttttgattaagcaatgccttgtattacacactcttttataactacatacacagctgataatcagtcttaaatttattactgaattctacttaaacaagtaatttgtcgtattatcgacatttttatatctttagcttatttcgttttagtttttaatttagttgttagtttttagttttaatgaaacataaggtccttatcatttaagtcaatgtatacaaaaaaggttgtaccttcggtatattgttgaaaaataaaatacaaatacaaatacaaatacaat

SEQ ID NO: 2551 - DNA, 109 bp, Culex quinquefasciatus
  source 1..109: mol_type = unassigned DNA
tagaaacatccaaagttaaattatctctaccgagcttatttgtcgtcttattagcaagtggtgaaatgtaaattcaagaaaaatgttgtaaaataaagtgaaaaaaaaa

SEQ ID NO: 2552 - DNA, 45 bp, Culex quinquefasciatus
  source 1..45: mol_type = unassigned DNA
taggaaacagtctgttcaagacgaagataaataaataaataaata

SEQ ID NO: 2553 - DNA, 21 bp, Culex quinquefasciatus
  source 1..21: mol_type = unassigned DNA
tgattggtatggtatggtatg

SEQ ID NO: 2554 - DNA, 507 bp, Cyprinus carpio
  source 1..507: mol_type = unassigned DNA
tgaacccccccaccccccctccctctaacatacgatgtcatgcaccagtcactttgtgcagcagtggtctgctcactacctcattcaccatggaactgacgtcattctaccacctcatcagtcagtttaaataaaataactgctcttgagccctttgtcactttgtcacttttaatcagactgaataagctatttttttatgcactaaaaatctttttatctgcactgtttgttcactggtttgcactctatctgccatgtgccttgcgctgcttttatttaaccttatttttattttattttttctattatgtcttttttacattcccttattgtatagttttatcttatattttatatttgatctagattttaggctctactgttagtgttatctgtatgcaccgggggtctgagagtaacgcaatttcgattctctgtatgtatgtactgtacatgtggaagaattgacaataaagcagacttgacttgacttgacttgacttg

SEQ ID NO: 2555 - DNA, 32 bp, Danaus plexippus
  source 1..32: mol_type = unassigned DNA
taatgctgggataattgccaggaagaagaaga

SEQ ID NO: 2556 - DNA, 344 bp, Danio rerio
  source 1..344: mol_type = unassigned DNA
taaattgagggtgtttctggccaaaattattttaatctttttaacttgctgctaggatatgcacttgccactttatacacttggacattaaattgtatgccttcctggctcacattttattaacttttaaatttgaaaagctgcttggaaatgcacttgccactttatatgcacatcatacgcacttttaatattgtattgtaactcttcatttgattttatatttttatctctttttaattattgttgttgttttagataaataggactgcactgaagggaagggcaaatgtaaatttcgttgtattttgtacaatgacaataaagattctgattctgatatt

SEQ ID NO: 2557 - DNA, 619 bp, Danio rerio
  source 1..619: mol_type = unassigned DNA
tgactcttttgcccccccaatacaccccccactctcctctaacttaaactcctcgcaataactgcactgtttaacatttgcacatttaaaatttgcacattcactgcaccacattgaactgtttacttattgaactgtacatacccactgcatatgggcatttgtaattatgtacacacccactatacatatacacttgtaatcatgcttatttatctgcatactactgattattaatagcaacctgtacatatattcatatattgtaacatatacacttgtaatcatgtttatctatccctgtacatatattcatatattgtaacatatacacttgtaatcatgtttatctatctgcacactactgattattaatagcaacctgcacatatattcatatattgtaaatctgttcatagcttatccaacctgtatataatgttcatagtacatccatctgtaaatatcaccatagttttctataactgcactttataacttattcctgtatcctgcacttgctgctattgcactgctggttagacctaaactgcatttcgttgcattgtacttgtacatgtgtaatgacaataaagttgaatctaatctaatctaatct

SEQ ID NO: 2558 - DNA, 391 bp, Danio rerio
  source 1..391: mol_type = unassigned DNA
taatatattcaaaaaacatttaaaaatctggtttatagagaatcagacgtgtcatcattccgattaaaatgaacctagcatgtttccaattgtgccyaccatcttaatgatctgttgtttaaatgtgtttcaactatttttatctctattacaaaatgttggtgttttagyttaatttgtaaatattctcttttaacatctayatraccatgtctattttagtactttttaactatgtttgatwgattgtataattcttgtattgttttttttaggttgttcagggacaacagataaaaaatagccttckggctaattctggtgcatttgcagaaatgctaattaatgtacactgtccctgccaaataaacaaataaataaataaataaat

SEQ ID NO: 2559 - DNA, 242 bp, Dicentrarchus labrax
  source 1..242: mol_type = unassigned DNA
tagggctggatcaggtgagtcctgaaccatcccttagttatgctgctataggcctagactatcgggggatttcccatggtgcactgagctcctctcttcctctctctttctgcactcattcatgtcccattaatgcatgttactaacttcacttcttccccggagttcttgtgctttctcgtctcgcaggttctcatggatcctggtggagcctcctgccatggtcctgcttgactgccatt

SEQ ID NO: 2560 - DNA, 388 bp, Drosophila sp.
  source 1..388: mol_type = unassigned DNA
tgaccaaaaagacgatttaagattgtgttgatgggtttccgcattaggattattaggattcccacaatgttttggagcaatttcttgatctgcagcgaagtgtttgccaaatgctgtatcagcaatttcagcatacgttaactgagagacataattagcgtcaaatgtattgacttatgtattcttatgttaccttgcaaaccatttacttaatctcgtttaaaaattatctgattttgacaaaattaatgataattgttataagccgaggtttgataattaaccaaatgcaatccagttgggctttccagtttcgaatccgaatgaatttagttgtgttcagaagaattattgcacaactaaagatgttatgaaaaaatagattcat

SEQ ID NO: 2561 - DNA, 16 bp, Drosophila sp.
  source 1..16: mol_type = unassigned DNA
taaaggaaaaaaaaaa

SEQ ID NO: 2562 - DNA, 222 bp, Drosophila sp.
  source 1..222: mol_type = unassigned DNA
taggtttagtttataactccacgtcacttggcgcagacgtgtcaaaatgtatgtcaatatttaaattgtaacaaaaaagtgtattttgatgttgattgttttttgttttcgattagttgccctgaagacggttgccgaggagcaaccgaaatatattggtcaaaaaacataaattgtgtttttaatatcacccagaccttgagccggcaaaacaccaaatat

SEQ ID NO: 2563 - DNA, 23 bp, Drosophila sp.
  source 1..23: mol_type = unassigned DNA
tgatggccaattattattattaa

SEQ ID NO: 2564 - DNA, 152 bp, Drosophila kikkawai
  source 1..152: mol_type = unassigned DNA
taggggtcacagcgcccgcgaagcaatgccaggcggcggtaccgctgggcgtccgattcgtattctttctgttaattgttaagccatccatgtttatgtgtagtgtatgtatatattgtagagtaataaatataacgaatataaaaaaaaaa

SEQ ID NO: 2565 - DNA, 514 bp, Drosophila kikkawai
  source 1..514: mol_type = unassigned DNA
tagagccctttcatttttccacaaaatagtgacaacccatgagccttcttacttgtttaataaattaataccggcagcctcgcaaaggactaaaaattttatatgccctcgagtccaaatgctcaactccgagaggcagttctttgtcaacgctatccgtctatggaaccaattaccccatgaacttaaaactattaggaatgcaactcaatttaattccaaagtaaaactatttttaagaaacaacgcataacaaacaaataaacaaacagcaaacttcatattaatacgtaattaaagatataaaaataaataaaataaaataaaataaaataaaaataactaaaaataataatataaaataaaataaataaataattagttcatataataattaatgtactaggtattaagtagaaatcctgtctaattttaactcaagtgaccagggcattaataataagtattttatacttgtagcactgggctaattttgtcaaaataaataaataaa

SEQ ID NO: 2566 - DNA, 136 bp, Drosophila kikkawai
  source 1..136: mol_type = unassigned DNA
taattataacatattccacacacatatctttgttaatacactgtagagcggaaggcctcggtagccattgctcattatcctttgttaacttttagtttataactattagttagcattaaataaataaataaataaa

SEQ ID NO: 2567 - DNA, 68 bp, Drosophila sp.
  source 1..68: mol_type = unassigned DNA
tgatgtgagtcgggtactatgtttatgttggcagatatttgttaactttaatgtaataaataaataaa

SEQ ID NO: 2568 - DNA, 138 bp, Drosophila simulans
  source 1..138: mol_type = unassigned DNA
  misc_difference 73: note = a, c, t, g, unknown or other
tgagcaaatcctgatcgtcctcgcgaagcaatgcttcacggccataccgcggggagtcctggatttgccctcntaaatgttattatgttgtatagtatatagtttagaataagggttcaataaacgaattaaaaaaaa

SEQ ID NO: 2569 - DNA, 1401 bp, Drosophila sp.
  source 1..1401: mol_type = unassigned DNA
taacaaamgtcgacacaaaccgctccccaaaaatgcagctcattctacaaaataggaataaacaggctacatggaagattcttaaaatctacactaaagccatggatgcgggttatttcactgaaacaataatacttaagcgccagcaaagtgtcttcatctctatcctgatgacctgcaaaacccggacgaagtatccctccgacgacgcatccctgctgaccccgacgaagcgcaagtgaaggatgtcatccactaggactggcaaagaagtatctagaagcagagggacacgtgaaggatcaacgtgcggcaaaaacatgatgaatctaagtagactcattgcagcagcgcatgcataatgtcacttacctgaaccttttgctgcaaatcccttgaaatgtcctgaaataacagctgcaatctccccgaaaaccgtactcaatgacaaaagacgacccgacttgtcgcaatagataaactaactttttggcacttagaacacaaaaaacatacaaggttttgatccagtctctttattgggattcccccacgtcctcacagaccctaggcgtgttgctgccgacccggcaaaagatcgaaatcgtaacccctgaaattgaccttttttttcccttagaattaatatcaacgaaatctttgttaaagatcgaaataatttaatcaaaacataaaacagagtattatataataatatataawaaaaaattcacaatgttttgaagccgtctcaacgtcaagaagcccactcgattttattgacccttggcgcggcmctgccgacccgacaaaaggtcaaaatcgtgacccttgaatttcgactttttcctggtagcaacgattatactgacaatatccctgaaaaagaataacagatcaataaaagcttaaaactacgcaacctactactcccctactaggcgcaacataaaacgaagatttggcacctaaaacagtaaaaacctaaaatgttttgatgtcgtttccatgwtgggatgccccctcgtccttctgaaccctaggtgcgccgctgctgacccggcaaagggtcaatctcgcgacccttgaattcgactttttcctggcagcaacggtaaacagacaaaatccctgaaaaattataaaacaaattataaaacaaattataaaagcataaaaccacgactcggcgaaatgaawaacgacgattttggcacctaaaacattaaaaacctaaaatgttttkatgccgtttccatgctgggatgcccccccgcccttmtgaattccaagcgcggcgctgctgacccggcaaaaggccaaaatcgtgacccttgaattcgacttttcctggtagcaacggcatactgacaatatccctgaaaaagaacaataaattaa

SEQ ID NO: 2570 - DNA, 55 bp, Entamoeba histolytica
  source 1..55: mol_type = unassigned DNA
tgaacaataagttgaaaggtattaaaccttaatttaatatttattctttattctt

SEQ ID NO: 2571 - DNA, 74 bp, Folsomia candida
  source 1..74: mol_type = unassigned DNA
taaagaatttcatttatatatctattgtagttatgctaatattatggattacaattatgtattatgataaagta

SEQ ID NO: 2572 - DNA, 372 bp, Gasterosteus aculeatus
  source 1..372: mol_type = unassigned DNA
tgactataacactccaccggtcactccccctcatactgcacatgccactttaactgcaattcatcactttgtcgtcactcgtcactttgtctcttgtctgttacttgttcgttagtgcactttatgcttaatatttttctttttaactttttaatatttaaaattttttaactttattcccttgttttatactaacccatagccttagccttattctactaacccattgcattagcatttcattccactttattttattacttgtgcactgttgtcttgtctgtctactgtcgcgcactaaccgccaagacaaattccttgtatgtttgacatattttggctaataaatgtttcctgattcctgattcctga

SEQ ID NO: 2573 - DNA, 39 bp, Gasterosteus aculeatus
  source 1..39: mol_type = unassigned DNA
taagcggttgaagatggatggatggatggatggatggat

SEQ ID NO: 2574 - DNA, 87 bp, Gavialis gangeticus
  source 1..87: mol_type = unassigned DNA
tgatcccagcagtctttcctgcccacgtgcaggggggctggacctgatgatctgtaaggtcccttccagcccctaacaactatgaaa

SEQ ID NO: 2575 - DNA, 91 bp, Gavialis gangeticus
  source 1..91: mol_type = unassigned DNA
tgaccccagtgctcttcctgccatggcagggggtcggactagatgatctgctcaggtcccttccgaccctagaaactatgaaactatgaaa

SEQ ID NO: 2576 - DNA, 91 bp, Gavialis gangeticus
  source 1..91: mol_type = unassigned DNA
tgaccccagcatccattcctgcccaaggcagggggtcggacttgatgatctgtttaggtcccttccgaccctagctactatgatactatga

SEQ ID NO: 2577 - DNA, 174 bp, Gossypium arboreum
  source 1..174: mol_type = unassigned DNA
tagaccgaacggtcttgtaataatgtagcccatttaatttgtaagactatgtgtagtgaggctaaaaattgtttttttgatatggattatccttcggaaatccatgatgctgttattagtgatgttacttaataatatgtgttgacccttgtggtcgtttttgctcaaaaaaaa

SEQ ID NO: 2578 - DNA, 338 bp, Harpegnathos saltator
  source 1..338: mol_type = unassigned DNA
tagcagggaggggggtaaggagggagggtggatgtcccctccctccttgacaggagacaccagaaggccaaccggcggggcaacccgccggggaccgcgccctggattcccttcgtggaacagggcgcggtacacaggtggcgaggggctcccggaagggagccctggggccggggggttggggagggaatacgggagtagttcccctgactcccctcctcacggtccgacaggtagacatcccgcaggggttttagtcggtaagagtccgacataaccccctcccccccaagggggggggtatccatgatggatttcccctgcgtgaccaaaaaaaa

SEQ ID NO: 2579 - DNA, 322 bp, Hydra vulgaris
  source 1..322: mol_type = unassigned DNA
tatttcaagttatttgatatttttgtcgactgtgtgatgaatattatttaaacaatatatgctgaatactttatattataatattgttcaatattgagaatgttatatatccatattataaaatattatgttaaaacttgcttaacatctgaagaatattctaacgcttatgtaatttttaatatttgtaaattttctaccttttaattcgttatatagattgtaaagggcttcatgataagatcatgtgatcttctggaagtcctaccagtaatatattcaatgtaaatttaccttgttcatatttttctggaaaaaaaaa

SEQ ID NO: 2580 - DNA, 98 bp, Hydra vulgaris
  source 1..98: mol_type = unassigned DNA
tctctatgactattatgaaactgttaatagcaatggctcataatagattcaacatggcgttgaatctcaaggagcataaataaataaataaattattt

SEQ ID NO: 2581 - DNA, 411 bp, Hydra vulgaris
  source 1..411: mol_type = unassigned DNA
aacattaaaccgatacaacacgcgatctaccggaagatttaaaaaacctttccgttcatcaaaacttacgagctttgccatttcctatcgtggcccaatgctatggaaccattttacaagtctgagtggtaaacttaaagaagccaatacctctcaaaaatttaaaaagaacataatcgaacttattgccaatcacgattctttacatgattttttctaacaatacacgattatttccaatttttattatcaaaggttactgatgaaaagactttatcttcttcaggttctccggtcttgtaactattataaataatgaaatgtacttgtatttaatatttctaaatattttacggaaattatctttaattgtaaatggttgcttgacaaaaattgaaataaaaaaaaaaa

SEQ ID NO: 2582 - DNA, 523 bp, Hydra vulgaris
  source 1..523: mol_type = unassigned DNA
aaacaatttaaaggtttaaactaaatcacttaaaaataaattaaatctttaacactttctttagcttttattaaaatggtttcaaaccattagtataaaagataacgaaaataaaattgtctttttcgttcatatttttgatgatattaaataatcagcccaaatacttatgtttacatatattgcttttttttttttttaattaaacaacacattttttttgtgtgtttttataactttcatgactttttgtcgtttttacttttttatttttaaaattattctgcttgaagattgttagcaacaaattattttattgctgaagtttttgatttgtttttgtttttgtatttatactgtctttttgtcttttatcatttattgtgcatgtaaatttttgtgtgacggggctcggtgataagacaacctgtcttcttcttgctccggccaggattttcttttattgtaatttcttttttgtaatatttatcaacggcaaattaaataaataattaaaaaaaaa

SEQ ID NO: 2583 - DNA, 585 bp, Hydra vulgaris
  source 1..585: mol_type = unassigned DNA
atatttctaccaactaatattgacattctttactatatatgtcaattcgtaatccttcagtttttaatttgatatttttaacattttgaaattctctacttatctatctacatctaatttctctggttttctatctgccatttttaaactttattattaaactatctatactaatattattaattttagtaccaatgggttggcattctttatttatctatctatttatctcttttcattcaaaaattctctatttctcaactattctacttcgtactaaatctttgttgttgccatcactctttactaaatttttgttgctgctgttattgtctttatttatgaaattcttctcttattataattgttattatttcgttactattattattattgttataattattatttttgttgttgttgttgctattattattcttatcacaatcattgttattattgttattattgttattattattttaytgttattattgttattactattattattgttattattgttattactattattgttattattgctattattagtattattaataacagttattattatta

SEQ ID NO: 2584 - DNA, 419 bp, Hydra vulgaris
  source 1..419: mol_type = unassigned DNA
catatattttatagtttacagtatttgttttcagtatttttttatttttttatttcttcttcttcttatttttcttgtttttaatattttttgtttttgaatttgttacactaaaaaaatatgagctttgtttttattgaatttttattttatttttaaaaattaaattgtttttataatgagtgactataggggctctatgaaaaggttgtgatgttaaacacatcatccttaccttctttgagtccctgactgattagaacagaatatacataatataaaataaaaaattatgaaaaaacgttttttatcatgtttatctttacgacgtgtattttatgtattttttacatgattatatgaaaattgttattgtaactgtttaatcagcaaaataaaagtwtatataataataataa

SEQ ID NO: 2585 - DNA, 539 bp, Hydra vulgaris
  source 1..539: mol_type = unassigned DNA
atcttatacctttttacaacttattatttataaccctaacgcagtgcttctattcatcttttaatttttctcatttctatcgtgatatattactaattttaatatcaattattaaatttattattataaactgatatgtttctatagtattctcttatcactgttgttgttattattactatattttatatcgtaatgaatattattgtaattgttattattgttgttgttattatttttgttgttattattgctattattattgytattattattattattattattattattattattattattattattattattattatagtatattctttttataatcgctactattattttttttatcactataatcactactattacttttattattcctacttgtattataattattattattactatctccatcttatttttatttattttgacaggtgtttactttatattagtacaaattactatttgtaaatatccttgatgtaacaactttattcagaatatatwtgatttgattt

SEQ ID NO: 2586 - DNA, 416 bp, Hydra vulgaris
  source 1..416: mol_type = unassigned DNA
tcaaatacaggaaacacagaataaaaaatcctttacaaacgaagcgtttgatgcatgcaacacacttgatttaaatttcatacagtgcatgttaaatggcaaaaaaattaaattgacgcaacccgtcgtagagctacaaactaatgttatgctaatattgaaagaaacgttccagttttggaatttgaaagaaaagagagaggcgtttaaaatcttgatggaggagaatgttcctagaactctgtcccaataatatgtggaaaacaaaccggctgtttataagcatttattgctaacaactacaagagagcccgtgttgttttagctgatttttaatttattgtttgactatttaaatattattttacctgtaatttattaccgggtgataaagagaaaatataatataataataa

SEQ ID NO: 2587 - DNA, 1475 bp, Hydra vulgaris
  source 1..1475: mol_type = unassigned DNA
aaactcaaaaattatggtataaaaaatacaaatttagcttggtttaaaagttacttgactaatagaaaacaatatatttcatatgatggmggaaaaactgaatatatgacaattacttgcggtgttccccaaggatcaattctaggaccacttttatttctaatttatataaacgatttaaataaattttctaacattttaaactcaattttatttgcwgatgatactaacttattttattctaataaagatattaatattttatttaaaacagtaaacaaagaacttataaaaactaaccgaatggtttaaatcaaataaattgtccttaaatataaataaaacaaaatatactttatttcatcgtcttcataaaaaagaaaatattccattaaaacttccaaatctttttattgataactcattaataaaaagagagcaatcaataaaatttttaggcgtkattcttgatgaaaatwtaacatggagggamcacataagtataattgaaaataaaatttcaaaaaatatwggtatattgtataaagcaaaacagtttttaaatcaaacttgtttaaaaaacttatatttttcttttattcattgytatctaaattatgcaaacattgcttggtgcagcactaatgcaacaaaaataaaaaaactgtttagtaaacaaaaacatgctataaggatwattacaaatgtagatcgtttctctcatactaaaacactatttaataaacttaatattctaaatgtatatcaactaaacctttatcatattcttatttttatgtttaaacttgataataaaatatcaccaattttatttaattcattttttaaaaaaataaatcatatataccctacaagattttcaaaaaacaattatattcaatccaaaacacattattcagcaactaaattctcaattgcaaatcgaggtcctaaattatggaatacaatattaaataatgagcttaaaactaattcttctttaaaccaatttaaaacaaaacttaarcaaaaacttttgataaatgaaaatgaattaaatttcttctaaaaagctttttaaattagcaaacaaaaataaaaattaatctattaattactctttaatattaatttaatattttaaacaattgtcttattgaaatctatttattatcttataagttttatttacgacgattttttaagttttattattttttttkaatttctttttattattttcttttttattartacttacttattttactaatcaattattattataaatttttcgaattacwaaatagttatatattttattttttattttgttaacgttttacttatgaatgcattttggggcttagtgataagacgaattttgtcttcttctagccccagtcatgtaaatatttgtttttataaattacattgtaaattattttcaacggcaaataaataataaaaaaaaa

SEQ ID NO: 2588 - DNA, 444 bp, Hydra vulgaris
  source 1..444: mol_type = unassigned DNA
aaatttatgtaaaatgtatttttcaaatcttcagcatattgagtattaaaatgttagtatattgtatatttgcattatgttatattgtattagtatattgcatatttgcattatgttaaatctttgcattatgtcttttttaaggttccggtgataagatccttctgatcttctttcggaaacctagtcttatattgttagtacgctgaattgtatatacatatatatatatatatatatatatatatatatatatatatatatatatatatactcattttttttttcttttcttgtagaagtcttaaatatttttatgtatcagacttatattattatatatcacgacttatattattatatatgtatcagacttatattattatatatcacgacttatattattttgtatcacgactaacattgtaaactaaaaaaaaaaaa

SEQ ID NO: 2589 - DNA, 487 bp, Hydra vulgaris
  source 1..487: mol_type = unassigned DNA
ttttttgtttctttttttaactttatatttaacactgcattaataaattttataatttaacaatttataaacagttgtttaacacttttgttaaaggtatcttaaaactgtataacaaaacctttaacaaaaagtttaacaattgtgctaaagatatcttaaaactgtataacgcatctatgtatttataacggatttctttttctttttttctttaaatttgtttatgttttcaattcttaattcttaatwatttgttatcttcatgtatgttaagtatatattcctattgaaagtttatttattttgagaatattttattaatacgaaatattaacacgaaaattttttagcggttctcgacgacaagaccttacggtcttctacgagtwcccgcgttcttttatttcttaatatcatttatattattatatcattgttaacgaatatttattaaatacaaagttgtaataaagaacaaaaaaaa

SEQ ID NO: 2590 - DNA, 104 bp, Hydra vulgaris
  source 1..104: mol_type = unassigned DNA
cgttttttattatttagtgactgaactaacttgttcattaattaatttataccggctgtcatagatattgcctggcgctttatctcaacagcattaattaataa

SEQ ID NO: 2591 - DNA, 152 bp, Hydra vulgaris
  source 1..152: mol_type = unassigned DNA
tacaattttgttgtaacttgtccagcacttgatacaatttaacatttcagtaaaaaaaaaaaaatgtttttgttaatgtatactcagtgttagtggccttcgggtccttctgttgttttcaaataaataaataaataaataaataaatatat

SEQ ID NO: 2592 - DNA, 974 bp, Hydra vulgaris
  source 1..974: mol_type = unassigned DNA
taaaggaatgtcaaagttatgattttaaaaagtcttcattttatttagccaaaaggaaaacaaaatacgaatataaaaatctaactgtcttaactctttacaaattattaaacaaaccaacaaaagtttagactataaattttataaatggaaagattgttttgaaagcatgaaaaatataaatgaaaaagattggaaacgtttctttataaatcttcaaaaaagtaatactaacaacaaagcgtgcgaaattctatttaaaacagcacactttttgttgccaaccaacgataaaatgtttgattttaaaattagaaaagacaaactttgcccacagtgcaaacttaaaaatgaaaatactgcccacatgatgtatgaatgtgaaaaagtacagccactaatattttatgttctagatattttagaccagctctaccctactgaataccctcataataacaattttaaatttattttatttggatacgaaaaaaacgcagcccagaggctttttggcagtttattattagaaagttttatttgtgaaatatattttaacagaatgaaaagtcaattcgaaaagaaaacattcactaagaaatatttgctagaaaagtttgatagaaaagtcaaaagattatttttaaatgagttacttatgctgaggcaacaaaataaacaagaaaaacacataaacgaaataagaaacatttttaaaaatggaagattaaatttgatagcagatgttcgtgactatttcgtataattttcgttttttctttttcttttttcttttgttttttcgatttttattttttattttttatttattttttagttttattttatacgggtccaatggacatctttgtaaacgttttttttcgttttttcgttttttttttaaaccttgtatttattatgaggacgtcagtatggcaattagccggatgacggaataaattacaatacca

SEQ ID NO: 2593 - DNA, 537 bp, Hydra vulgaris
  source 1..537: mol_type = unassigned DNA
agtaaactamaataaaaaaaaataaaaaaaaacagattcaattatatcaatgatatatgataatatgaataagaaaagaaagaaaaaggaaaaaaaaaaaaaaaaaaaaaaaaaaaagaataagaaatccaagtgatgatgtcacaagtgatgatgtcataagtgatgatgttacatattcatttagtgttaattatgagattttattttttcaatttcttttatattcaatttttttttttttttttttttatattaacttatttcttaaacattttagcaactgttaagcatcttaacgcttcttaattaattcttattttttattttttttattatattagttattttctatttcatttctaattgtttcttttatatttatatttgtatgttacggttatgtagaatttttaatggggctcggcgataaggcgaaatgtgccttcttcttgctccagccatcaatttatataaatgtatatgcaatgtaaacattttttaacggcgaaataaattacactaaaaaaaaaaaaa

SEQ ID NO: 2594 - DNA, 76 bp, Hydra vulgaris
  source 1..76: mol_type = unassigned DNA
tggggtgtttcccctgctcgctgtatgtgtacattctatgtaaatttacggctacaactataataataataataaa

SEQ ID NO: 2595 - DNA, 189 bp, Hydra vulgaris
  source 1..189: mol_type = unassigned DNA
ctggtttttgttttataactatggtcttatatataattgtaatatatattttaaattaactagcatttgtattatgtgattgtagggcacgttgtcagagtccttcatattttatggacctgcgtgtcctttagaacatgtatcactgttctaataaattttaatctaatctaatctaatctaatctaa

SEQ ID NO: 2596 - DNA, 293 bp, Hydra vulgaris
  source 1..293: mol_type = unassigned DNA
cttttcttaccgagttgttgacatgtggaacaatatgacctcggaggctgtaaatgcaaataacattttaatgttcaaaaataaaattaaatctttcgactttaacaaatatctattgtaaaaggaacaactatttgtttctttatagttttgttattttattttttttttgtagcgatatttttaaatttctttgggcacgttgttagtgtccatctttgtatgggccttcgtgtcctttagaacatgtatttatactttgttctaataaatatcaatcaatcaatcatcat

SEQ ID NO: 2597 - DNA, 512 bp, Hydra vulgaris
  source 1..512: mol_type = unassigned DNA
agactctgaaatatgttgttatgcttttattattactactytcttgatacctactagttttattattaactttttgttctcatatttttattgttattattagtattgatattaataatattcttctatctttattagtaaattgttatttttatttataacataataagtattattattgcttttttaattttttcttaagtttatttactacttatactatgtaattgttattaccactattattgctattatctaatattgattgtataatatctttattattattgttagtattattactaataatattccttttcatcgtcatcttattattattgttaatattatttctataattattatcaatactattattattgttattataatcacttttattgtaatgttgcaggtttttactttagattagtacttgtactatttgtaaaagtccttgaaattttacaacttatttcagaatatatattgaattgaattgaatatatata

SEQ ID NO: 2598 - DNA, 317 bp, Hymenolepis sp.
  source 1..317: mol_type = unassigned DNA
taaagcccgaacaaaggagaagcagtggacagcggcactctccaacatagccgactggcctagactcgaagctgttgcagaatttagactgcgtaccggacacgattgcctggcgaaacatctccacagaataggagtatacgcccaaccaacatgccccctatgtgaccttcaggaggaaatggagaagacccatctgatacggtgtccagccctacagacagcgacagaaacccagagatactgggaagccagaagtcaactaaagggctaatgataactattataaagcctgccatttgatataataataataa

SEQ ID NO: 2599 - DNA, 111 bp, Ixodes scapularis
  source 1..111: mol_type = unassigned DNA
tagtcacgaccttgttttgttgcctgcatttatccttgatgacgagcggtgtaccactatttaggccttgtgctgtttttggacacccaacaaaaataaagattattatta

SEQ ID NO: 2600 - DNA, 167 bp, unidentified
  source 1..167: mol_type = unassigned DNA; note = Description of Unknown:Locusta migratoria sequence
tgactgtgttaatttattctttgtgtgctgtatgcatcttatataccttattttatgtctcttttgtattcttgtatgttttacacatttttgtattttttgtatgtatagttgtataagacctgctaaatgatgtgcactgccatacgataaataaataaataata

SEQ ID NO: 2601 - DNA, 484 bp, unidentified
  source 1..484: mol_type = unassigned DNA; note = Description of Unknown:Locusta migratoria sequence
tgactgcaacatcaggtctacccaggccaaaaacagacctgtataaagtgacagatgatgcaatttcatggctggatggtttagacattaatatataaggaccatgttcgctgcttatctttcttaattcagttaacataaattgtgtaaatttactgctcatttcattgttgtttttctattacttattttagtttcctaacttaatgttcctttattagtgttcattcaattgttcatcttactgtacgatgtatatatctttcataaatttgtattaatattttataaatatttttttccaaattccactgcatcacacatgtaatggactttttactgcatacctgtatacttctctgtaattaatgcacttaaattttgatataagctgtttgttgtctctgcttcccacctggagaagtgtcattgtgtaatgtatcttcatgtccaagtgtttatgtcatacgataaataaataaat

SEQ ID NO: 2602 - DNA, 799 bp, unidentified
  source 1..799: mol_type = unassigned DNA; note = Description of Unknown:Locusta migratoria sequence
tagaaattggtcttcaggagagggacctccgattaagttacaccagaaggtacttgggctttggaacactgagtgggttgactcgcctgccccaaacaagctccgtgcagtgaagctttctacagctccatggaagtcctccctgagggcctctcggaaggagtcagttgtcctttgtcgcctgcgtattggtcacacgtggatgacacatggccatctacttcgacgggaggatcctccacagtgtcgctgtggcactttattgacagtggtccacattctgttggactgtccccttttagctgccttacgacagtcttttgacctgccagctgcgcttccttttatgcttggtgacgacgctgctacagctgatcgtgttttacgttttatccgtgcagctgggttttatcatttgatctaaaggtgggtacctcagcctgatctctcaggcacccatctctcacagatttttactcttcttattttgtgttgtctgacctgcttttactcgtatgttttagaatgtgcagagtggctggctcatcctttattatcctcgtgatcagccagccacaatattctgctgtaactttttagtccagttatgtttatttcctctttgtgttttctttttggtgttccgagctagtgttccttatattgtgtacccattgtgtgtttctcttctgtgtgattcagcgctcgttttttcagcttgcattacactgtattgtctttgctcgcaacaggggactgatgaccagcagtctagtcccctctaaacaacaacaacaac

SEQ ID NO: 2603 - DNA, 100 bp, unidentified
  source 1..100: mol_type = unassigned DNA; note = Description of Unknown:Locusta migratoria sequence
tagtttgttacacgtgtaatattatatgtatctttgttattaaaacatcaaataactgtaaattttgtgatgtagccatacgctaaataaataagaaata

SEQ ID NO: 2604 - DNA, 87 bp, unidentified
  source 1..87: mol_type = unassigned DNA; note = Description of Unknown:Locusta migratoria sequence
taaaatatgtagaacgcctggttaggtgtaagagagggcctgaaggccctaatcttgccaggttaaataaatgagtaaataaataaa

SEQ ID NO: 2605 - DNA, 103 bp, unidentified
  source 1..103: mol_type = unassigned DNA; note = Description of Unknown:Locusta migratoria sequence
taaataattgtcttgtaaatatgatgtattcacataacatgtaaatattgtacattagtttatacattgtaagtgcttctgacacgaataaataaataaataa

SEQ ID NO: 2606 - DNA, 248 bp, unidentified
  source 1..248: mol_type = unassigned DNA; note = Description of Unknown:Locusta migratoria sequence
taacagtcactatcgatatttttgatgtttggtcatctttggttgtgttgactctgcagtgacttgtactgtgtgtgttatcttccttgtttaccctttgcaaaccgaggtattaaatacgcttgcacattgcttccttgagtgcagttgtgccttgagaatggcagggtgtcctcctgccgaaatatcggcggttgtcgacgacgtcacccggcagcatacccgtaagttgtttgaacattcattac

SEQ ID NO: 2607 - DNA, 103 bp, unidentified
  source 1..103: mol_type = unassigned DNA; note = Description of Unknown:Locusta migratoria sequence
tagatgtttgttgtgaatacatgtaatgtaatatatgtaatgaatgtaccataatgtaatcagacactgaaatgtacttaaatgccatacgctaaataaataa

SEQ ID NO: 2608 - DNA, 666 bp, unidentified
  source 1..666: mol_type = unassigned DNA; note = Description of Unknown:Locusta migratoria sequence
taaattgtaatgccttattttactagttataaaatccttgtgtaatcacaactgttttggctgcttatgtgatataaacttaatgtcttattttactagtaaccatagtttaatttaaccagttaaaattttaacatatatttacagatgtttcattcaactttgtcacacgcttccatgttccagacattggacctgtttaagataattttttggtcaagtttaatttaaccagttaaaattttaacatatattcacaacgcttccatgtttctagacattagacctgtttaagataagatacgttttgatcaatatttttcagccaatttctattgtttcactttatatttcttaggataacgtcataatctattatattgtcacgtattttatcaatgtcaggaatttacaccacaacttgaattgtaatatttcccgcaggttagttataaaccaaaacactagtctcctttgaaagttatatatctagcaagttaagatctttgaaacttaaacttgtaatgtttacctgatgatggcgtaacagccgaaaaccggttcgtaaaccaataaatttgcagaatatctcacagttatcttgtgtatttcattcataatgtatcaaatattctgtcaagaaccgacggaacagtcagtgaatat

SEQ ID NO: 2609 - DNA, 339 bp, unidentified
  source 1..339: mol_type = unassigned DNA; note = Description of Unknown:Locusta migratoria sequence
tgatatagacgtacacagaattttaaattgtaacattaccattgtgatatattgagtcactgttctatattgtactgtacaacaatgagatagaggactttgaccattsatgtagatgtatacagaattttaattgtattttttctaacaaatttactattgttactacttttcattgtactgtattgtattaggaaaatttaaaactaagtatatgataattgtacctatgataaacactgcaaattactagctgtttagatatgtatttaaatgtatatgacgacaccaattacatgtaaacatgtttaaaggtgaataaaatattctattctattc

SEQ ID NO: 2610 - DNA, 377 bp, unidentified
  source 1..377: mol_type = unassigned DNA; note = Description of Unknown:Locusta migratoria sequence
tgagtcctctgggtggtcttttagatcattatctatgttccacttgacgcgtctttcgactacagcttttcttgtgtacgctatgtggttggcttttccctttttatacccatggtcggtcaaccacattcattggctctgtcatttttatctcgtatttgttactgtgtgtctggcgtcttttgtatcgtctcttgttgactctgtcaatatttcattgacggtgcgttcttttattctgcgctattttaaatctagctcaggcgcatttatcgacgattatgtttttctgcgtgtcgcctagctatgaagtgggggactgatggccatagtagtctagtccccctaaaaccccccataccaaccaaccaaccaac

SEQ ID NO: 2611 - DNA, 425 bp, unidentified
  source 1..425: mol_type = unassigned DNA; note = Description of Unknown:Locusta migratoria sequence
taaaatagaattttgtaatgaagaactgtgacaaacatatatatgtaaatttgtattactgtgttaaagtgttctaataatatatgtgaaattgcattaatcctataacatttaatacttatctgtaaaattaattacctgtgtttcatggtattcatttattaagtgtgtttcacggtgtatattcatttactaagtgtaccagtacttaattttgagtcaatcatattgtgtaaaacctttcaccattatattcatttattacatataccagaacataagtcataaattgaaccatattttatgtaggcctaactacgcttttttgttttgatttaatgtcaatcatattgtataaaaccttttgtaaatacctcatgacaacatcgattgcatggacatgcttaaagatgaataaataaata

SEQ ID NO: 2612 - DNA, 106 bp, unidentified
  source 1..106: mol_type = unassigned DNA; note = Description of Unknown:Locusta migratoria sequence
tagtactgtaagagccttgtattgttagaatagctgtataagaacaatgtaattaactaaagaatatttgcctttgtatatgccgaacgagtaaataaaataaata

SEQ ID NO: 2613 - DNA, 62 bp, unidentified
  source 1..62: mol_type = unassigned DNA; note = Description of Unknown:Locusta migratoria sequence
taattaaacaatgtataaagtgtgtaaagatagcgatgtatgccatacgataaataaataaa

SEQ ID NO: 2614 - DNA, 441 bp, unidentified
  source 1..441: mol_type = unassigned DNA; note = Description of Unknown:Locusta migratoria sequence
tagttcctgcctctaccacccttcccttcctctccctgccactctctatccttacattcgtctcccatcccgccacacatttcattcccttcccttccttttccgcactgtccgtcagacagcactggcgtattcccccacccatgccacacatcccccccccctcctctcctgcttccctctccttgccacctcctcacccccaccactggttgctctcgcctaggatgccatgctgggtagcgcagatcggccacagcggccggagacggcggtcgtgtcgtgtgtgtgtgtgtgtgtgtgtgtgtgtgtgtgtctctaacgacgaaggcctaaaggccgaaagctataatgttgttgtctgttatttgtgcctttctgcggctcatcggacatctctgtggtgagtaagcaacctatccttctcaaaaatattgttga

SEQ ID NO: 2615 - DNA, 15 bp, unidentified
  source 1..15: mol_type = unassigned DNA; note = Description of Unknown:Locusta migratoria sequence
taataataataataa

SEQ ID NO: 2616 - DNA, 414 bp, unidentified
  source 1..414: mol_type = unassigned DNA; note = Description of Unknown:Locusta migratoria sequence
tgatgcgacgggtagcatacctcgcaggcgcacaccgaattcgaagccaggagagtagcgtggccacgataacattctgtagtggtcaccaamagcagaggagatcgccatgaaagtgctaggaacgcgcatggcgggcgcggaccacctatggaacgcctgggacggccgccactagagagccgcagggcgcggaccgacgagggatcaccagcgtcagataccaccgccagactggagcacattgggcgcggaccgcatagaaagcaccagacgccgcctaggcataaatatgggacgcggtcggcttgtcgatcagtctcagggaacacctgatgaagacgccgagttacggtgtcgaaatatcgtgtttggaagacgcggatcaccggcagtacacccgattccacgaga

SEQ ID NO: 2617 - DNA, 178 bp, unidentified
  source 1..178: mol_type = unassigned DNA; note = Description of Unknown:Locusta migratoria sequence
tgacgtcacagcccgcagtgcagctatataaggacgacagcagcaatcactcgacagtcaaccacttgacaatggccgaggagatctcggccgaaacgtcgtggacagtaaaccacatgacgcggctggaagcccgagaaaattttatcaacataactcgcgcgaaacaatgcattca

SEQ ID NO: 2618 - DNA, 269 bp, unidentified
  source 1..269: mol_type = unassigned DNA; note = Description of Unknown:Locusta migratoria sequence
tagccttgtttcgacccatcgttttgccgattttctccaccggcgcgctactagttctattgcgcctagagggcctctactttggtttcgcgcacgcgcggtgggtcgtcagcggtgtataaaggggccgctgtttctcgttctgcctcagtttccggcgagtaagtgtatcagcgcactcacctgaagatggcagccagttggtctgccgaaatatcgtgtctagttgacgacggtatccggctgcacacccgagatgaatattatca

SEQ ID NO: 2619 - DNA, 107 bp, unidentified
  source 1..107: mol_type = unassigned DNA; note = Description of Unknown:Locusta migratoria sequence
tagtggttttgtaatttgtttatatataatctcttttgttttgtattatagttgtactcttgtctttgaccttttgtatgcaacgcttttgacacgaataaataaat

SEQ ID NO: 2620 - DNA, 454 bp, unidentified
  source 1..454: mol_type = unassigned DNA; note = Description of Unknown:Locusta migratoria sequence
tgatgcttgtggcgtgcaaatcactatacgccacattttaattgagtgtattttatatcgtgctgagagggcagcggctaatcttggtcgtgccctacccactgttttagctgacgacgaggcgagtgtgacgaacgttttacaattttgtgaacgttcccgactctggcctaagctcttaggctggaggttttagtgtgttacaggagggctcgctgatgcctctaacatcagcgatcagcgtccctctatactccgacattttcttttaaggacttgtaaggttggatacttcagtctgccaccttacatcgctgatttgcaatatgtgttcgtgttgttgccaagacctacattctattgcctgttcttatttatttactgttgtctaattcttttgtcagggcgctaaaaaccttgctgttgtgcgcccaaaacatcctatcctatccta

SEQ ID NO: 2621 - DNA, 179 bp, unidentified
  source 1..179: mol_type = unassigned DNA; note = Description of Unknown:Locusta migratoria sequence
tgacgtcactggcggcggcgcggctatataagcacggcagcggccgcgaaatgacagtcatccacttgacaatggcagaggagttctctgtcgaaagctcgtgggcagtaaaccacatgacgcggcttgtaacccgagaagatttcattaatggatatcgccgcgaaaacatgcactca

SEQ ID NO: 2622 - DNA, 147 bp, unidentified
  source 1..147: mol_type = unassigned DNA; note = Description of Unknown:Locusta migratoria sequence
tagtattttctctggtttgtttgtttgcttgcttttattatgcatatttgtacatagtttttgtatttgtaattcttctatatatgaaaattttcaaataagactgtagcatgaccatgtaagccatacgaataaataaataaataa

SEQ ID NO: 2623 - DNA, 564 bp, unidentified
  source 1..564: mol_type = unassigned DNA; note = Description of Unknown:Locusta migratoria sequence
tgatgttgtacttcgtgcagtgtccgaaatatttcttccgacttgatccaaagcatttgtattccaaaagccaatttttaactgttttgcttattaaaactttgttactcgtttattctctctactaatattgtattgccaaaatgacgcctcagccatctctcatgttaaacaaagcattttgtagcaattgttttttcaatactgtttctctctgtacagtagcctagttgtaattgcggctactagatggcactactgaggtaacgtcttcctgttcacaactccacttagcacacgccagtctgatgcctccgtgcaggcgtgcagcccatagtggctagctttttctaaaaatttctttttaaattttgtgacgtaagctttacagctgagttgtatattttattatgtgacttgttttattttataatttctgatgaaggcaatcatagtcattgccgaaaccaggttaaataatttttaatttgcgaccgagggctgcwtttttatcctttgacgttgtaacggtcgctgacaatagcagctatgttcaaaatttta

SEQ ID NO: 2624 - DNA, 272 bp, unidentified
  source 1..272: mol_type = unassigned DNA; note = Description of Unknown:Locusta migratoria sequence
tagtgactgaaattaagtgtaacagattgagatggctgggccatgtagagcgaatgtcggaggatcgagctgttaaaaaggtctacaaggaaatccaggtgaaagaagcaaagggaggcctcggaaacgatggctggaggatgtggaaaacgatttgagaaagatgggagtaggagatggaggaaacgagcagaaaatcgtcaggattgggctgcgatcatcagagaggccaaggccctacatgggctgtagcgccaaggagtaagtaagta

SEQ ID NO: 2625 - DNA, 85 bp, unidentified
  source 1..85: mol_type = unassigned DNA; note = Description of Unknown:Locusta migratoria sequence
taaatagtataaggtggttcgatgaaccctctgccaggcacttaaatgtgatttgcagagtatcccatgtagatgtagatgtaga

SEQ ID NO: 2626 - DNA, 19 bp, unidentified
  source 1..19: mol_type = unassigned DNA; note = Description of Unknown:Locusta migratoria sequence
tgagaacgagagaagaaga

SEQ ID NO: 2627 - DNA, 191 bp, unidentified
  source 1..191: mol_type = unassigned DNA; note = Description of Unknown:Locusta migratoria sequence
taagctaattcatttttttctttattgattcttttcactttgtcttaagattgtcgtgtgcataggactacttaaaaattttctattaccattcttgtgtaaaaattaatgtattgacttgttccatgaccatggagtctcactcctcaattgggtcctatggaacagaaaaaacaataaataaataaata

SEQ ID NO: 2628 - DNA, 584 bp, unidentified
  source 1..584: mol_type = unassigned DNA; note = Description of Unknown:Locusta migratoria sequence
tgacctctctctgtagattgccgccgcctcctccctccccctcccgtcccccgcttggctcaccccctcctttctccacctccccgggagctccttccttccggtttcccccattctcccctcccccacctcccttccccttcccccgcgccttctccatcctcccccctccccctgcagggccagtacagtgctagtgtttttaagtgttcagtgcttcgtgtgtatagtgtttcgtcgcccagtgttttttaacgttgcgtacacgcctgtgggaaaccagtgttcagtgttttttacctcaatgtcgccgtcatgttatgtctcgtcgtctgcagtgagtgttttttagccaccgtggcaatgtcttgttttaacaaccatgtatgttctgtccactgtcatgttgtcttttaacattctcccatattttcatcttgtaattgtaaaagcgccattttatcacctttaattttatattctgttttgtccattgtttaccattcgctcggctgtagagcagcatcatcggctgctgccagcctgcctgtattagggcattaaaattcaataaaggaaaaaaa

SEQ ID NO: 2629 - DNA, 263 bp, unidentified
  source 1..263: mol_type = unassigned DNA; note = Description of Unknown:Locusta migratoria sequence
tagtgatgttttatctctgacaaggactatctctgctgataacgtgacagcttggccacgcccacttttcacagtatatatggcgctctcagacacccgactcatcagtcggcaagactcaacgcaagtaagaagacctccgaagatgtccggcgcagctctggacgaaacgttaggagaaactgaaaagttttatggaccacggccttataacccggaagttctaccagcaactatgatccggtcgtgaaagccttcatgca

SEQ ID NO: 2630 - DNA, 104 bp, unidentified
  source 1..104: mol_type = unassigned DNA; note = Description of Unknown:Locusta migratoria sequence
tagtgtaaaaccttatgtactaggtgtattcatttctgggcgtattagtatgttggaggtaaacctctgtaatgaggacaatctcaataataaaataaaataaa

SEQ ID NO: 2631 - DNA, 435 bp, unidentified
  source 1..435: mol_type = unassigned DNA; note = Description of Unknown:Locusta migratoria sequence
taaacaatcccactgccaatcatagataatagcgcaacaaaattatcaaagataaaatatcccaacatatttcgttcaattttaaataaaagctttgcctcatagatatatattctctgtgcaaataatgtaagcatattacatctctgtagagctgtcaagtaaatgtcaaaatccgtaacttgataaagatcttgcatgacagcacaatattataagttacgtgatatataatacaacataacagaatgtggtatgtagcatttcttttacatctgtataaaacaagtaggcagcatagtataaatattatgaaaacttatgtattgcaggcataacacctgaagatgactattaagtcgaaataagcttatmgtgtaactaatacgaattaaaatatacagtgttgaaattatataattgttattattaaaa

SEQ ID NO: 2632 - DNA, 30 bp, unidentified
  source 1..30: mol_type = unassigned DNA; note = Description of Unknown:Locusta migratoria sequence
taggagatacaggaaataagtcaagtcaag

SEQ ID NO: 2633 - DNA, 256 bp, unidentified
  source 1..256: mol_type = unassigned DNA; note = Description of Unknown:Locusta migratoria sequence
taaaccagtggtgaatgcccgaaacgagcctttgggggatcaataaatgacatccaccatgcatcacctgaagggctcaactggatcacctgttggacttagaatctaagaacttgtgtaatgtgtacataatttaatataacactgtacatatgatcctgtacatatattgtccttgtcatacatatcttacaatgtatacaattagaactatgtacttgaaccaagctctgtatcatcattcgataaataataa

SEQ ID NO: 2634 - DNA, 805 bp, unidentified
  source 1..805: mol_type = unassigned DNA; note = Description of Unknown:Locusta migratoria sequence
tgaagattggtctccaagacagggatttcagactgcaactgacccgtaaggttctgggatttggacctcggaatgggctgccttgaacgaaccgaataagctgcgcgtagtcaagcccccacagccgtgtggagatcctccctgcgagcctctcgtagggagtctgtagtcctctgcagactacgtattggmcatacgtggttgacacacggccaccttctacgcgagaggacccaccaaattgccgttgtggtgcactattgacgtggtccacatcctggtggactgcccacttttagccgacttgaggcagtcttttaccctgccttctgagcttccattgattttatctgacgatgcctctatggttgaccgtgttttaggttttattcgcgcagctggcttttattggtctatttagtggtggggcctatttgcccgccttctcgggctcccacccctccagaacaataggccgttgtccttttacggtttatgacttgtttttcaattaaggattttagtgtgtgcagagtggctggctcatcctgtattatccttgtgatcagccagccacactcttctgctgtcctattttagttttctgtctatttggtcaactcctgtctgtcctctgttatatgtcgtcattttaccattgactgtctctctgtacccggagtatactggacgtggagtactatgcgacaaaagggaaacttttaaaagtgaactcttagctgggaacaggggactgataacccagcagtttagtcccctttaaacacccaacaacaacaacaac

SEQ ID NO: 2635 - DNA, 190 bp, unidentified
  source 1..190: mol_type = unassigned DNA; note = Description of Unknown:Locusta migratoria sequence
taagatgcaaatgtatgttgtcaattatcatcagcagtgatatgaacatgtaaatttactaaatataatattttatttgtctgtaagtgtagatgatgtacttaagattttatgtttgtattgtatacaaatatgatgacaacatccatacaatttttattgtatacggatggataaataaataaataaa

SEQ ID NO: 2636 - DNA, 488 bp, unidentified
  source 1..488: mol_type = unassigned DNA; note = Description of Unknown:Locusta migratoria sequence
tgaagtgacctgacgcggctccgaatcgggcactgcccattaacgcacaagtttttattgtcaagaagatcctcctttttgtgatgcctgtggcgtgcaacttacatagccacattttaatgagtgcatttatatcgtgctgcgagggcagaagccaatcttagtggtgatctgccctccattttagctgatgacgaggcgagtgtgaaaaggttttaagattttgtgaagcgtctgcactctggcctaagcttttaggttggagattttagtttgatgcgagtggctggctgagttcctccttgtgtgtcagccagccgtgctaatctacctagtcctctcttggtaactgtgatatgaatgtttttatggcctcatttaactagcttgtctcttatcttgtttgacactcgtctcactctgttttcgtccgggtgctaaagacctcgacgtctgcgccctgatccataatcaccaccacaccacca

SEQ ID NO: 2637 - DNA, 214 bp, unidentified
  source 1..214: mol_type = unassigned DNA; note = Description of Unknown:Locusta migratoria sequence
taacattacaattacctattgtacatgacatttatcctacattttagcttataaattttattactctctggacatggccagctttagccgaaaagtcttagccctacaaaatacatgttcatgtaatatctatgaagagcctaacaaacctatctatccgatgtctaatgtacgtataaagtttgatgcttctgacacgattaaataaaataaa

SEQ ID NO: 2638 - DNA, 178 bp, unidentified
  source 1..178: mol_type = unassigned DNA; note = Description of Unknown:Locusta migratoria sequence
tgattcaattgtactatatgttgtatttgtctatctctgtttttatagttttaaatctgtactttatattttatctctgtatttgactactgctttctgtaaaagcacttactttgtagtttaaattatgtgctggcttctttcagttacatttgtgatgtagttcgtacacgaataa

SEQ ID NO: 2639 - DNA, 75 bp, unidentified
  source 1..75: mol_type = unassigned DNA; note = Description of Unknown:Locusta migratoria sequence
taaaagtggttcgatgaaccctctgccatgcacttcaatgtgacttgcagagtatctatgtagatgtagatgtag

SEQ ID NO: 2640 - DNA, 554 bp, unidentified
  source 1..554: mol_type = unassigned DNA; note = Description of Unknown:Locusta migratoria sequence
taaagtacaatccatcctaccgtaatatacttccaaatatgcaacaaaacgcgataaattatagtagcaccgcaatattatccctatattacaatatagacacaaacaatttattacacttaaaatagttcggaatgaaattaaaatttattgtacgatatttgtatggtactgtttatgtcacactgcatataaccaacgatattgttacaaacaaaattaagcaaagaatatttaataaaaacatctttggatcaacagctctgtaaattacaccaaagtaattacaacaaacagcgtgacctaaacagtaaccaaatataaatgtatatatgaatgtaagtaattacaacttgtacagtcaatataacattgccatattaatgtattttcatgtaaaacacactttgttctctgtaataggtggcttagaaaatgggcaaagcccgaaactagtcgtcagcatttcaaataaaagcagctttggtgcatatataaaaatgtcttttctacaatatttaagagctgcaaaacgcgacatatcaaaaacattt

SEQ ID NO: 2641 - DNA, 128 bp, unidentified
  source 1..128: mol_type = unassigned DNA; note = Description of Unknown:Locusta migratoria sequence
tgagaatgtcctccgcagtcggggacgaaacgttgggtttcaataataaatccacaagaccacggcataatagcccggaaatttttagtaattttgaccattccggccgtgaaagtttacattttaca

SEQ ID NO: 2642 - DNA, 81 bp, unidentified
  source 1..81: mol_type = unassigned DNA; note = Description of Unknown:Locusta migratoria sequence
tgacagagatatgttttatcttattaattagacactagtatatcttactaaagtattatatgtagctgacattataccata

SEQ ID NO: 2643 - DNA, 176 bp, unidentified
  source 1..176: mol_type = unassigned DNA; note = Description of Unknown:Locusta migratoria sequence
tagacatgctaaaaactacttaataaatgtaatatagtaatgactcatttttgttgtgatgtgccatatatactatgtgtatatagaaatctgtatacttatgtaaaaaacctgtaagcaatatcctatatcaataatttgatgaagtggatgcttaaataaataaataaataaaa

SEQ ID NO: 2644 - DNA, 137 bp, unidentified
  source 1..137: mol_type = unassigned DNA; note = Description of Unknown:Locusta migratoria sequence
tagctcttccttttgttgtattttaccctatgtttttagctgttttcatataggcttattatccttcggtatatctcagttttgattcgggcgctaatgacctcagcagttgtgcgccctaaaaccacaaaaaaaaa

SEQ ID NO: 2645 - DNA, 270 bp, unidentified
  source 1..270: mol_type = unassigned DNA; note = Description of Unknown:Locusta migratoria sequence
tgatgttccttatatagctaatcaaaattgagaatataagttttgttgcaaacattgtactatatacctcataagtattccccctataaatattgtgctatgtatcccttgttttgttgtaaacattgtactatataccatacctacctcatagttcataagtattccccttataaatattatgctatgtatcccttgtaaccaactgacgtattcagaaaaatgatacttgtatcatttgatgttgaataaagtttatttatttattta

SEQ ID NO: 2646 - DNA, 175 bp, unidentified
  source 1..175: mol_type = unassigned DNA; note = Description of Unknown:Locusta migratoria sequence
taggagccgtacgcacaactaggatcaccaagacgacgcaaaccgcaaggacaatcaacaagccaggacacagaataccagcacccagttattttggaggcgtagctcaccagcttggactccaccgaccatcggaaactcatatgtttccgtcattgcacgagcgagcgagcga

SEQ ID NO: 2647 - DNA, 156 bp, unidentified
  source 1..156: mol_type = unassigned DNA; note = Description of Unknown:Locusta migratoria sequence
taaatgaagcaggacttaaatggcttaaatcactggacctggctctgtgacgggagatcctattcacacataatttttaatcccctgaacgcaagtactatgtactgtagtaacaatagtttaatatggtggctgacaagaaccatacgataataa

SEQ ID NO: 2648 - DNA, 203 bp, unidentified
  source 1..203: mol_type = unassigned DNA; note = Description of Unknown:Locusta migratoria sequence
tgactgacagcagcgccctctgttttgcctatatatacgacgcttactcgcgctctcgttgcagtacgccgctttacctccgaggatgccttccgcagacgagggcgaaacgtcaggggaaagtttcatgtatggaccacggcatctcagcccggaagctttaagtaatgacgacacctgccgtgaaagccttcattctatga

SEQ ID NO: 2649 - DNA, 59 bp, unidentified
  source 1..59: mol_type = unassigned DNA; note = Description of Unknown:Locusta migratoria sequence
taattgtatgtatatattcttgtatacttgtgaaaaccatacgataaataaataaataa

SEQ ID NO: 2650 - DNA, 23 bp, unidentified
  source 1..23: mol_type = unassigned DNA; note = Description of Unknown:Locusta migratoria sequence
tagcgccacaaaagaagaagaag

SEQ ID NO: 2651 - DNA, 29 bp, unidentified
  source 1..29: mol_type = unassigned DNA; note = Description of Unknown:Locusta migratoria sequence
tagttccggacacggaaagtaagtaagta

SEQ ID NO: 2652 - DNA, 214 bp, unidentified
  source 1..214: mol_type = unassigned DNA; note = Description of Unknown:Locusta migratoria sequence
taatttaaaggtgaactgatgtagtgctggaaacagagaagtggactgtgtcttttcactaaatttctaatacttaaataccacatgttatatttataaatgataaatttgtaaaattttctttctttcttatgttatataaaattaacaacatgacttgtgtctaatatcattgtaaatatgatctacagacaaataaattattattattatt

SEQ ID NO: 2653 - DNA, 66 bp, unidentified
  source 1..66: mol_type = unassigned DNA; note = Description of Unknown:Locusta migratoria sequence
tgacaagaagaggatcaacccatgacaagacctgccgcaaggcagaatacaattgatgatgatgat

SEQ ID NO: 2654 - DNA, 76 bp, unidentified
  source 1..76: mol_type = unassigned DNA; note = Description of Unknown:Locusta migratoria sequence
taaattttaaaatttattacatggactcaaactagatgtaaaggatggtgttctggacacgaaaaataaaataaat

SEQ ID NO: 2655 - DNA, 334 bp, unidentified
  source 1..334: mol_type = unassigned DNA; note = Description of Unknown:Locusta migratoria sequence
tgaacagcaacaggttaaccaaacagatttttaaatatctctgggacaagaagtcaacaatagctggattcaagaagttaggaaagatttggaaagaaacaatataagtgaaaaagatgcaacagaaagagaaacttttaagaagaaagtgttaaaaatggaaggattccaaggcaggagggagaagaagacaggagtaaagtggtctgaggagagaaaaaggatgcatagtgaaaagatgaaagaatactggaggaaaaagaaagaagaacaaaggaggaaacattgaaattggtgcgtggtccttagatggccgaaacgaagaaagaagaaa

SEQ ID NO: 2656 - DNA, 31 bp, unidentified
  source 1..31: mol_type = unassigned DNA; note = Description of Unknown:Locusta migratoria sequence
tgacatggattcggacacgaaaaagtaatgt

SEQ ID NO: 2657 - DNA, 477 bp, unidentified
  source 1..477: mol_type = unassigned DNA; note = Description of Unknown:Locusta migratoria sequence
taaatgaacaagttcaagcaatacatacagcttttttaaaaactttgtggacctattataacaaaagtcgtttattttaaatttcaacctctgtcttactgtgcaaatgatttcgtgacacctgaatgtacccactagcttgtggatgatctttggaatttagaggtctttgttttcatgtgcatacgtgcgccccactcgtgttgttgactccgtgcatttcgctagtgttatgcgccgccagtgctggggtctgtttgaatcctgacgaagcacagtatgctgaggacctttctgcgtagacacggttacaagggaagtaaccacgttttcttttattacgttttagatttttattgtctcaggttttaagattcttgtatagattatctgatgatgagggcttgacccttgaaacgcgtcatattttagtgtttttacacgatctctgtggttgagcctacttgacaaaataat

SEQ ID NO: 2658 - DNA, 363 bp, unidentified
  source 1..363: mol_type = unassigned DNA; note = Description of Unknown:Locusta migratoria sequence
taatgggaagcctgatatttcaggcacccaccattcaaacggttttaatcttttcgtcctgtcagtccactttgactggcagtttagtgtgtgcagaatggctggctcatcctatattatctttgcgatcagccagccacattcttctgctgtgatattttatgttgttgtctgtttggtcaactactttgtgttttcctttaaatgttgtctcttagcacgcattatcactctgaccgtctctgcattagacgtggagtactttttaccgctaattaaaagatgtgctctcttggctaggaacaagggactgataaccgttgctgtttagccccctttcaaaaacccaacaacaacaacaac

SEQ ID NO: 2659 - DNA, 243 bp, unidentified
  source 1..243: mol_type = unassigned DNA; note = Description of Unknown:Locusta migratoria sequence
tgatgtttattatcgatattctgaccggtttcatctttggtcgtgtcggcgctgtgtgcttgcttgctcggtgtgtgttgtctttcctgtttactcattgaaaaccgaggttttaaagatcgttgcacattgcttcctcactgcagtttcgccttgaaaatggcagggtggtctcctgccgaaatatcggccgtcgtcgattttggtacctggcagcatacccgtaagtttttcgaagttgtt

SEQ ID NO: 2660 - DNA, 314 bp, unidentified
  source 1..314: mol_type = unassigned DNA; note = Description of Unknown:Locusta migratoria sequence
tagaaatgtaggtctatgataaagtgtgtagagaaaatgtaaatttactattagttattacgatgtatttatttatataaaaaatgtaatcatgctgtgtaaaagtggcaaatatccattttattcaatatgtagagtaacaaaaattctagcagtgaaaaacattatgtggtaaatcgtaccaagtaaaatgttaatctacttttaatattacaacacaagaaaagaaatatgttaggccagaaatggtccaatatctattgtaccctgtacagttctggattcacaggaccaataaataaataaataaataa

SEQ ID NO: 2661 - DNA, 81 bp, unidentified
  source 1..81: mol_type = unassigned DNA; note = Description of Unknown:Locusta migratoria sequence
tgaggatggcgggcagttgcgccgctgaaatattgtgtcaagttgactttagtatccggctgcaaacccgagaagattaca

SEQ ID NO: 2662 - DNA, 246 bp, unidentified
  source 1..246: mol_type = unassigned DNA; note = Description of Unknown:Locusta migratoria sequence
taattcataatatttatgttggccataaaagtaataaataaaaaaaataaataacctctgtattattaaattgtcatgtttatttttgaactaaattgtattaatgcataacaacaaattgtaataacctctgtattattaaattgtcatgttattattttgaactaaatttgttaacaacaaattgtaataacctttgtaatattgactaaagtggtccaatgaaggccataaaataaataaata

SEQ ID NO: 2663 - DNA, 114 bp, unidentified
  source 1..114: mol_type = unassigned DNA; note = Description of Unknown:Locusta migratoria sequence
tgattttataactacattgtatgtatatattattattttaaactgacgagtctcctgtacactaaatcaatgatttaacttgtatgttatgagacaataaaattctgattctga

SEQ ID NO: 2664 - DNA, 27 bp, unidentified
  source 1..27: mol_type = unassigned DNA; note = Description of Unknown:Locusta migratoria sequence
tgaccgaccggacacggaaatgaatga

SEQ ID NO: 2665 - DNA, 84 bp, unidentified
  source 1..84: mol_type = unassigned DNA; note = Description of Unknown:Locusta migratoria sequence
tagaaacctttctttacatctgcataatttttctttttaaattaatatgtaggtattttatgatgtctctgacacgaataagaa

SEQ ID NO: 2666 - DNA, 335 bp, unidentified
  source 1..335: mol_type = unassigned DNA; note = Description of Unknown:Locusta migratoria sequence
taataataaattacaaataaaaagtgttgtttattttataactatgtacacagtatggtactataactttgttactgtcttgaacacattgtaatacatctgtatgtttattgtctgatatctatttatggtagtgtacatatctgataactataatgtaattgtttattattcttgacattcatttcatattattttcttctatcttatgggattttctaagtcatttattgttgctattttgttttatcattattactattttatctaaccttgacgacaccgattgcatgtaaaaatgctcaaaggtgaataaagcatctaatctaatctta

SEQ ID NO: 2667 - DNA, 59 bp, unidentified
  source 1..59: mol_type = unassigned DNA; note = Description of Unknown:Locusta migratoria sequence
taatctaatataggtgctggaaaaatgtactgacattgtaaaaccagaataataaataa

SEQ ID NO: 2668 - DNA, 59 bp, unidentified
  source 1..59: mol_type = unassigned DNA; note = Description of Unknown:Locusta migratoria sequence
taattactcaagttcaatcgctctctttaaagggaataatcgaaataataataataata

SEQ ID NO: 2669 - DNA, 231 bp, unidentified
  source 1..231: mol_type = unassigned DNA; note = Description of Unknown:Locusta migratoria sequence
tagtattaatcctattagagttaagtcaataccttttatttacatccttttacatgtaatcaacctgtataaattatgttattaactgtttatctgtaaaaatcattgttatgttataggtaactcacatgtaaagaaatactgtatgtgtaaaaccctggtccgatgtaagagagggcctgatggccctaatctgatcaggctaaataaacaaataaataaataaataaa

SEQ ID NO: 2670 - DNA, 72 bp, unidentified
  source 1..72: mol_type = unassigned DNA; note = Description of Unknown:Locusta migratoria sequence
tagtggtactcaaggtaccctccgccacacaccgtcgggtggcttgcggagtatggtgtagatgtagagatg

SEQ ID NO: 2671 - DNA, 96 bp, unidentified
  source 1..96: mol_type = unassigned DNA; note = Description of Unknown:Locusta migratoria sequence
taattctgtatatatgctgtatatttctatacatttgtaacttgactttgtcaattgctgtaacagctaaacaataaaatttcatttatttattta

SEQ ID NO: 2672 - DNA, 263 bp, unidentified
  source 1..263: mol_type = unassigned DNA; note = Description of Unknown:Locusta migratoria sequence
tgactggctcatccattattatcctagtgatcagccagccacatcttctgctgtgatttttagcacagttgactatttggtccactacttttgtggtttcccttttccttttatatgtcatttagcacacactgccttcctgtacttctcgtgtactggctgtggagtgcttcgtcttcaactgtaaatcacatgtgtgatctctttgctgggaacaggggactgataacccagccgtttagtcccctttaaaaacaacaaca

SEQ ID NO: 2673 - DNA, 16 bp, unidentified
  source 1..16: mol_type = unassigned DNA; note = Description of Unknown:Locusta migratoria sequence
taaagtaaagtaagta

SEQ ID NO: 2674 - DNA, 242 bp, unidentified
  source 1..242: mol_type = unassigned DNA; note = Description of Unknown:Locusta migratoria sequence
taattttgtacataatgttaatacattctagtgaatttgtgaaaagtgacatttgattgttatatacatgtcttacacatgacataacttgtattaaattaaatatgtatatgtttgctcttgcacattaggagataagtgaaaatgaatatataatgctattgacgtatcctatattacacgtacatgtattgtacacaatgtaatcctacaggatcaaataaaaattcaattcaattcaa

SEQ ID NO: 2675 - DNA, 255 bp, unidentified
  source 1..255: mol_type = unassigned DNA; note = Description of Unknown:Locusta migratoria sequence
tagcagaaactagcagcgtcctacagaattagtcacctctttccatattttatgtttctagtttgtaatttgtgtattttaattgtatatttattgaattttgcattcttggattgtaatttgctcaatgtaattgtacattgtaaacatatatttagtgaatttggtgtccctagattgtaaattgtttattataattgtatatttattgatcgaaagatatgtcttagtcctgcacacgtaaataaataaaaa

SEQ ID NO: 2676 - DNA, 430 bp, unidentified
  source 1..430: mol_type = unassigned DNA; note = Description of Unknown:Locusta migratoria sequence
taagattttattgctgacgcttggacaggatgggtgggtttgtggccctccctgcgagcagcagggtttggagctctcccctcccctccccctgacgacttccatttctccttttaacttggttttaattcacgttgtttccccctttttacatttttaggcttctcatttaggagcatacactgttctcctgtatctgcttgtcattaattaacggggattctagatttgtcgcgacgttccttgcagaatcccgctttttctattggttttagtcctgttctacttgattttaacccccttttagttcctctattttactctcgtcacggtcttagccgaccacaccctggcttgcactccatacagaggtcatgggactgatgacctagctgtttggtcccatccacccatcaaccaaccaaccaac

SEQ ID NO: 2677 - DNA, 57 bp, unidentified
  source 1..57: mol_type = unassigned DNA; note = Description of Unknown:Locusta migratoria sequence
tgagggaagttgtgtaaacgtaacccatagatggctgtaacgaaaataaataaaaaa

SEQ ID NO: 2678 - DNA, 152 bp, unidentified
  source 1..152: mol_type = unassigned DNA; note = Description of Unknown:Locusta migratoria sequence
tgagcctgctatggacaataatgacgtatatgtgtgaaaatcatgagtatatatgaatgtataattagtacttagtttttatttgtaatctagtatatgtagcctattaattaactacagatgtagctcagacacgattaaataaaaataaa

SEQ ID NO: 2679 - DNA, 795 bp, unidentified
  source 1..795: mol_type = unassigned DNA; note = Description of Unknown:Locusta migratoria sequence
taatttccactgtctgtgaccgagacaccactaaaactgcctattttagttactttcatgcataatgttgtatggcatagttttctggggaatcagccactttccaaaaaaaatattcattgcacaaaagagagcgatcaggataatgagcggagtccaacctagacattctgtagaaacctttttagaaaattggggatctgacaactgcatgtcaatatatctactccctactgtgctttattgtcaaaaatgtgcacttgtacaaaactaatgatgttaccatactcacaataccaggaggaagctagatctccattatgaattaaaaaacctaatactgtacaaaaaggagtccactatatgagctgcaaagtgttcaatgctcttccactatcctgaaatcacttgtccatgagcctcccaaatttaaacaacagctcaaacaatatctatagataagtccttttattcagttgaagaatatttcaatttgtgttaacaatttattttttaatttacaagatgttatttttggtagcatgtattgtaattttgtcaatatactattcttgctgtgagatctaccttttttatgtaattttattcttttaattttttgtgtaatgtaatttttgtaattttaatgtgtaatttttgtctatacctttaatgtgtaatttgtctattgcaagagggattctgtatgttccttttgtaacaatttgacacgtcctacatccagtgaatgtctcgctgtattggatccatgggattaaataaataaataaataa

SEQ ID NO: 2680 - DNA, 248 bp, unidentified
  source 1..248: mol_type = unassigned DNA; note = Description of Unknown:Locusta migratoria sequence
taatgtaaacaccaatcctggacttccttttccaccaataggaagaaataaagcaaacaccaatgataagagagctgaaaccaccaatcataactggcaacatttaatatttaagacaccagctttccctcatccagcagtaaacgtaacacccagaagatggccgcttgcaatagtggccgaaacgtcggtgaaatatttgatatattgacgatgcggtccaatacccagaagagttttatcaacaa

SEQ ID NO: 2681 - DNA, 71 bp, unidentified
  source 1..71: mol_type = unassigned DNA; note = Description of Unknown:Locusta migratoria sequence
tgaaagtggttaatgaaccctctgccaggcacttaaatgtgatttgcagagtatctatgtagatgtagatg

SEQ ID NO: 2682 - DNA, 202 bp, unidentified
  source 1..202: mol_type = unassigned DNA; note = Description of Unknown:Locusta migratoria sequence
taatgtgacaatcaaaatttaatttataacctacactcttttattgtacatatttatgttaaaaagctaatcatgtaacaatatatattttaatatgtaacatttatatatgttaacttttgtaccataatgtatgcaatgacgatgccttatacaacatcacagttgtccacaggcaaaataaatcaatttcaatttcaat

SEQ ID NO: 2683 - DNA, 393 bp, unidentified
  source 1..393: mol_type = unassigned DNA; note = Description of Unknown:Locusta migratoria sequence
taaaagaatccgttgaaatacgcattgcggaaaatctgatgaaccgtgacagcggctaccagctgaataatgcgtggaatcccgtcatctccgagatttgttctagacgaagacgccagaagactccgataactgcggcagcggcactatcgaagacagctgatccttgcagttccaccagcgagggcgctgccgccgggcggtgtggtccttctgtcaccgtgtcttcgacgcatgcgcggtaataccaccagcgcgctatataaggcggagcggagagcgtcttcgtcagtccttgttggctcacctgaagatgactggcaggtgtccagttgaaatatcgtggaatgaagtttacgacgaccggctgcaaacccgaaatctttttgaaca

SEQ ID NO: 2684 - DNA, 111 bp, unidentified
  source 1..111: mol_type = unassigned DNA; note = Description of Unknown:Locusta migratoria sequence
taatatttctgtctgtttatagttcgtagtttacatgtatgtaagtaatctctgtatgttatacctttataaacttctgtacacatgatgcttctgacacgaataaaaaaa

SEQ ID NO: 2685 - DNA, 15 bp, unidentified
  source 1..15: mol_type = unassigned DNA; note = Description of Unknown:Locusta migratoria sequence
tgatgatgatgatga

SEQ ID NO: 2686 - DNA, 85 bp, unidentified
  source 1..85: mol_type = unassigned DNA; note = Description of Unknown:Locusta migratoria sequence
tgatgatgatggcacgttacgctatcgaaaattcgttccacaacgatcaatccatccggctgcacgcccgagagatcttcactca

SEQ ID NO: 2687 - DNA, 677 bp, unidentified
  source 1..677: mol_type = unassigned DNA; note = Description of Unknown:Locusta migratoria sequence
taaaacacacacacacacacactaaaacgaaagcaacatgattcaaaactcccgcccccaccacagtcagctgttcttaacactactcccagaattcaactgcccaccatcttgttttcataacataaacattgagtgaaagtgaaagtgacacagtgcctgtccacaacacgaaaacagcgcatatccaccaaagtaagtgacaaaaacttgttataaacacatagacattttgttatagaagcagtagctacagtaaaatcaaaccaaaacacaaaaactacgtcctgtattttcgtaaaaatcccgatatttacaagctaaccattcaccccattaaatacacacgttttggtttgcagatgacaaactgtcaaaaactmtcagtgacgttttgtgagttgaagaaccacaaacacaacacatgtggtattaaggtaggcctagcatacctataaaaataagaaacgatttatattagtctcacaattatctgtagttttcacagttaatgtacaaaaagtaacaatcattccattgttaatttgacagacaataaacatcccactgatgatgctgcaacgccagcgaaacatgtatgggagaaactaaaaaacatttgtgtttgctcaaggcggaccatacctataaagcaaatttatttgtaagcaaacacg

SEQ ID NO: 2688 - DNA, 187 bp, unidentified
  source 1..187: mol_type = unassigned DNA; note = Description of Unknown:Locusta migratoria sequence
taaaaaattcaggcatttgcaggatttgaggacagaactagaccgagaacgaaatcatcgtggacagaagagcgaagaaagatgcaaagtatgagaatgaaagaatactggaagaggaggaagaacggaagaaaggaagctgatgtgaattaacgtggtccaaagatggccgaaacgaaagaagaag

SEQ ID NO: 2689 - DNA, 166 bp, unidentified
  source 1..166: mol_type = unassigned DNA; note = Description of Unknown:Locusta migratoria sequence
tagttgcccacccattctacaatttagaagaatttctcaactgtaatataatattgtaatattactgacaagctgttatctcttttaaattaacaatttatgttatctatgtgacgttgtctattgctgtaatggcctaatgacaataaaattaattattattatt

SEQ ID NO: 2690 - DNA, 28 bp, unidentified
  source 1..28: mol_type = unassigned DNA; note = Description of Unknown:Locusta migratoria sequence
tgatctggacacggaaatgaatgaatga

SEQ ID NO: 2691 - DNA, 390 bp, unidentified
  source 1..390: mol_type = unassigned DNA; note = Description of Unknown:Locusta migratoria sequence
taatggtgggttcgtatgcctgatcttcaggcatacaccgcttatagttttaatctgttgtcacttttgtcttgtcagtcctatttccgactggcagttttagtatgtgcagaatggctggctcatccattattatcctagtgatcagccagccaacaacatctgctgtgattttwagcatagttgattatttgttccacctctattgtggtttcctttttctttttatgttgtaattttcgcccacactgtcttcctgtacatcttgtgtactggttgcggggtgcttatttttaaccgtaaatgaaatactgtgatctcttagctgggaacaggggactgatgacccagtagtttagtcccctttaaacacccaacaccaaccaacca

SEQ ID NO: 2692 - DNA, 298 bp, Lottia gigantea
  source 1..298: mol_type = unassigned DNA
tgacccccctctctattttctagctcattaagtataatatattctaatccttatatatagatgtttatcttttcagaacctatwaatactcttttcttttagaactggtaacaagaaaactttcatattatagacttttgtttattgtagattactcgtggttgtttttttaacttaatactaactatgctaacttcaccttatcttgtattgaacatttatctctttatttgtgaccttggccagtgctttacatagaagtttttaggaacttcttcactcttaacaccaataacca

SEQ ID NO: 2693 - DNA, 98 bp, Medicago truncatula
  source 1..98: mol_type = unassigned DNA
tgagttggatccaaatttggtgtatgatagaacactatggcgtcatttgatccatgtagccgaccccacttagtgggataaggcttggttgttgttgt

SEQ ID NO: 2694 - DNA, 41 bp, Melopsittacus undulatus
  source 1..41: mol_type = unassigned DNA
taaaacccttcccaaatcttcgttcgcgaagtcaagccatg

SEQ ID NO: 2695 - DNA, 18 bp, unidentified
  source 1..18: mol_type = unassigned DNA; note = Description of Unknown:Mesobuthus martensii sequence
tgattatgatgatgatga

SEQ ID NO: 2696 - DNA, 33 bp, unidentified
  source 1..33: mol_type = unassigned DNA; note = Description of Unknown:Mesobuthus martensii sequence
tagaaatgggaaggagcttgatgatgatgatga

SEQ ID NO: 2697 - DNA, 39 bp, unidentified
  source 1..39: mol_type = unassigned DNA; note = Description of Unknown:Mesobuthus martensii sequence
tagccccaacggttacccaaccatgggaagatgaatgaa

SEQ ID NO: 2698 - DNA, 29 bp, unidentified
  source 1..29: mol_type = unassigned DNA; note = Description of Unknown:Mesobuthus martensii sequence
tgaaataagaaatctgatgatgatgatga

SEQ ID NO: 2699 - DNA, 16 bp, unidentified
  source 1..16: mol_type = unassigned DNA; note = Description of Unknown:Mesobuthus martensii sequence
taggattggattggat

SEQ ID NO: 2700 - DNA, 222 bp, unidentified
  source 1..222: mol_type = unassigned DNA; note = Description of Unknown:Mesobuthus martensii sequence
tagccatcattgtggtgggaaaatttcccaggactgtatctgaggtccttcagacagctctcaatacagtctctaagtggtgtgatagggttggattgtctgttaatccagctaagactgtcattgtaccttttacacgaagaagacaattggcggggctaattgaaccatcattcttcggcaaaaggttgcagttttctacccaggtcaaataccttggtg

SEQ ID NO: 2701 - DNA, 1497 bp, unidentified
  source 1..1497: mol_type = unassigned DNA; note = Description of Unknown:Nasonia vitripennis sequence
  misc_difference 70: note = a, c, t, g, unknown or other
taaaagaaaatataatacaaatagagaaaagagcaaacgaaagaacgwaaagagcaatcgaaaggaaacnagagcaatagagaagaggaaaggaaaaaacaaayaaggaaagawagaaagaaccagacgaaggaackaaatagagcgcagggacatttagagagcaggggagacgacggaacaggaggaacagtggatgaaacaaaagtcactaggwawggacaagaaaacgatacaggtggaragaggaacgtggacgagacagaaaagaaaacacgtggtgagccacagatagaaaagaggttagtaaagataaaacaagtagtgaaaggagaagataaaaaagtgaaaaggagaagatgtacggagacaagaagaaagaaagagagatgagggaactgagagaggaggtrgaaggatggaagataaaggcgaggtttgagagagaaaaaagagaagccctggaaaagaaaatgcaggatgtgagagaggacgtggagtttttaaaggggaagatgaaaaacatgcagaaagagatagatgagatgagagaagggcttgcaggtaagaaaaatagagtggagacggtaaagaaaaggcaggagatgagaagagggagaagagtaataggagaagagagaattttgagagagagaaaggctgatgcggccagtacagatataggaaaggggacagcaggtgcaaggtgtgggaaagaggcctgatagtacacctaaacaattggacggaggaggattctataaaagactggctggaggatataatggaaggagtggaatgggagatggaagatacaaggacggaggacacgaaaaaggtaatttttaagagaaargaagacatggaattgatatgggagaagagggcggaaataagagaaggaggcaaaatcaggctggagcagtggctatcmttcgatgagagaagggccaaagcgctgattatgagagagaaaaggagaagagaagaggatgagatcgaggagggcgaggtctcgcacaaaaaagaatgggtagctgaaatagaaggcgaactgtacaagtgggacgaaaagaaggagagaattgtaaaaaaaggaaaagggatagaackgggagaagaggrcagatataagaaatggaggtcgggggagtcagaggaggaagaggaagawtatcagacaaagatggagagaaaggaagagtagagtttactcacaaacacacataaacacacacaaacaatcaaacacacacacacacgtacgacttatacacacgcacacacacacacatgcacaaacrgacacgaaaacargaaaagmaggagarcrcacayacacayacacacatrtacacasgaacattacctacagagacacacataacacaccagattaggttaaagtaggattaaagcaagaggtatgtaaatatacgaatgaataaatattgtaaacacgaatagtgaaatacaataaagttattattattatta

SEQ ID NO: 2702 - DNA, 183 bp, unidentified
  source 1..183: mol_type = unassigned DNA; note = Description of Unknown:Nasonia vitripennis sequence
ctcgtacacactccacgcacacgcacacacctactttctcgctcattccaccttcactatcgccayactytcacactatacatactctaaacatacctcaatctattgttatttcttttcttactttgtaatgctgtaaacttacaatcgtacaatataatgtacgcaaaataaaactaatct

SEQ ID NO: 2703 - DNA, 91 bp, unidentified
  source 1..91: mol_type = unassigned DNA; note = Description of Unknown:Nasonia vitripennis sequence
gggatgtcatgacgaagggtggtacaatgggtttacagcctaagtgccagggatctcggaggtccccccttcatagtaataataataataa

SEQ ID NO: 2704 - protein, 29 aa, Betaretrovirus sp.
PMGALQPGLPSPVAIPLNYHKIVIDLKDC

SEQ ID NO: 2705 - DNA, 31 bp, Nelumbo nucifera
  source 1..31: mol_type = unassigned DNA
taatgaaagttaccgtttcctataaaaaaaa

SEQ ID NO: 2706 - DNA, 142 bp, Nelumbo nucifera
  source 1..142: mol_type = unassigned DNA
taacttaactgtttcttttttccttttctctcttttgagggtttaagttgtattcggaagataagagtgtttgtcttccttgctgtaattattcttgtgatgtttcaatgaatttaatgaatctgttattgatcaaaaaaaa

SEQ ID NO: 2707 - DNA, 45 bp, Nelumbo nucifera
  source 1..45: mol_type = unassigned DNA
tagtttcatatctttaataaagtttcttgttattgatcaaaaaaa

SEQ ID NO: 2708 - DNA, 839 bp, Nelumbo nucifera
  source 1..839: mol_type = unassigned DNA
tgaatgtgcagagtttattcaggttcatgccgagtgggccaacaaaaagggccaaggctatgtggagatgtatgagggctgcagtatgctggactgtttgggaggagaggaactcacggatattctcagaaaaggagagaaccttggaagtaatattggaggtaatccatattagggtgatacattggctgaaaactttggccttgtttgcagacttctcagtagatgagatggtaaaaaactggaaggaaattgcagaattagcctcagctaagaaggcatcactctcttgctggagtcccccacctaatggctttmttaaactgaattttgatggcagcagtatgggtaatccaggtccatctggaatagggggagcaataagagatgaacatggaaatctgttagctatgttttcaggaccaattggggaaggagactccttgagggctgagattcttgcagcccttgaaggggttcgaagagccaaggagatgcaaattagaaagctgatcattgaaggagattctgaagtggtggtgaactggttaaaagaggataactcaaggatatggaagtacagcaatgaaaaacgaaaatttaagtggctggctaaggatgttgaaattcagtacaaatgggttaagagaagtgcaaactcactggcagatggtttagctaggcaaggggttaatagaaactctttgttttgggctttattgtaattgtatttgctgctcatagactgtttagggagctaagattgtttagcccccttgctttgtaattcttcttaattttaatgaatacatttcacagttattgataaaaaaaaaaaa

SEQ ID NO: 2709 - DNA, 11 bp, Nematostella vectensis
  source 1..11: mol_type = unassigned DNA
taacaggtaac

SEQ ID NO: 2710 - DNA, 497 bp, Nematostella vectensis
  source 1..497: mol_type = unassigned DNA
taataatacctattgatatatatatgcatgaaaagatatatttatttttatttaacatttacattaacaattaacatattttttactagtttctgatctttagggtgcatgccatggatgcatggagcggctgccaaactagcgggagttggctcaagggtgaggcaaagattctttgtttcgcgcttgggttgattcttgttggttggctgtttcatgcatttatggcattcactctattgatgataattttaatttcatgtatatataattaattatttaattttatcaaatatctaatttcaataattttcaagtaatatatatttatgcttcattttcaatttaacctaaattatttttccgatggccgataattattattattatatttttcttttgtatttacatattgtattttctttttcaactcctagtatagtcttaactgttttttaggagtataactattaaagattaaagattaaagattaaag

SEQ ID NO: 2711 - DNA, 139 bp, Nematostella vectensis
  source 1..139: mol_type = unassigned DNA
taatagtataacgctatatgtgctggccctttgccttaattcagtctgtaatactgccatggcaattgaataaaacccctatctatctatctatctatctatctatctatctatctatctatctatctatctatctatc

SEQ ID NO: 2712 - DNA, 38 bp, Nicotiana sylvestris
  source 1..38: mol_type = unassigned DNA
taatattaatatatgtttatcttttaaaccaaaaaaaa

SEQ ID NO: 2713 - DNA, 1446 bp, unidentified
  source 1..1446: mol_type = unassigned DNA; note = Description of Unknown:Notamacropus eugenii sequence
cttggtactggctaagaaatagaatggtagatcagtggaataggttaggtacacagaagtcaatgacyatagtaatctactgtttgataaacccaaggaccccagcttctgggataagaactcactatttgacaaaaactgctgggaaaactggaaaacagtatggcagaaactaggcatagaccaatacctgacaccatataccaaaataaggtccaaatgggtacatgatctagatataaagggtgatactataaacaaattaggggagcaaggaatagtttacttgtcagatctatggagaagggaagaatttatgaccaaacaagagatagagaacattatgaaatgcaaaatggataattttgattacattaaattgaaaaggttttgcacaaacaaaaccaatgcaaccaagattagaaggaaagcagaaaactgggaaagaatttttacagcaagtgtctctgataaaggcctcatttctaaaatatatagagaactgagtcaaatttacaagaatataagtcattccccaattgataaatggtcaaaggatatgaacaggcagttttcagaggaagaaattaaagctatctatagtcataaaaaaaatgctctaaatcactattgattagagagatgcaaattaaaacaactctgaggtaccacatcacacctatcagattggctaacatgacaaaacaggaaaatgataaatgttggagaagatgtgggaaagttggaacacctaattcattgttggtggagctgtgaactgatccaaccattctggagagcaatttggaactatgcccaaagggctataaaaatgtgcataccctttgatccagcaatactacttctaggttgtatcccaaagagatcataaaaatgggaaaaggacccacatgtacaaaaatatttatagcagctctttttgtggtggcaaagaactggaaattgaggggatgtccatcaattggggaatggctgaacaaattgtggtatatgaatgtaatggaatattattgtgctataagaaatgatgaacaggtagacttcagaaaaacctggaaagacttacatgaactgatgctgagtgaagtgagcagaaccaggagaacattgtacacagtaacagcmacagtgtgtgakgactrtttttgatagacttagctcttctcagcaatgcaakgatccaaaacatttccaaaggactcatgatgcaaaatgctatccacatccagagaaaaactgtggaatckgaatgcagatgaagcagacttttttttttattctgtgtcttcttttacaacatgactaatatggaaatatgttttacatgattgcacatgtataacctatatcaaattgcttaccatcttagggaggggggaggggagggagggagaaaaatttggaactcaaaattttaaataaaaa

SEQ ID NO: 2714 - DNA, 451 bp, unidentified
  source 1..451: mol_type = unassigned DNA; note = Description of Unknown:Notamacropus eugenii sequence
tgatgggctggccacgttgttcgaatgcaaaatgtatgcttgccaaaaagactattttatggagaactcgcatggggcaggtgatcacatggtggtcagaagaaacaatacaaggacactctcaaggtctctctcaagaactttggatttgactgtgcaacatgggagacactggcacaggaccactcagcatggtgtgcccacatcagaaaaggtgctgtactctatgagcaaagcagaattgagatagcacaaagtaaacacaggatgtgcaaatttggaatatccaccccaaatattcatatggactatctgtgcccaacctgtggtagagcattctgagctcatattggtctgatcagccacagtcggacacactgaaatttcactttatcatggtgatgtcattttggtcctctttgaagatgaaggacaacaaccaacctattat

SEQ ID NO: 2715 - DNA, 189 bp, Oryzias latipes
  source 1..189: mol_type = unassigned DNA
tgagttgatgtttttattggttttatttttttattggttttattatttttatttaatgtatcgatttttattgattttattctgttttagtttgttgttttgtttttattctgcgttgttaagcactttggtcagcttctgctgttttaaaagcgctttataaataaagttgacttgacttgacttgac

SEQ ID NO: 2716 - DNA, 37 bp, Papilio sp.
  source 1..37: mol_type = unassigned DNA
taagggataagggcaagtggatgatgatgattgtaga

SEQ ID NO: 2717 - DNA, 18 bp, Papilio sp.
  source 1..18: mol_type = unassigned DNA
tgacaatgatgatgatga

SEQ ID NO: 2718 - DNA, 29 bp, Papilio sp.
  source 1..29: mol_type = unassigned DNA
taaggagatgatgatgatgatgatgtatg

SEQ ID NO: 2719 - DNA, 128 bp, Papilio sp.
  source 1..128: mol_type = unassigned DNA
tgaaaatgtacatacatactttattaaaaaaaaaactttttatatttaactttaactatttatattgttattaataagttgtaaatattgtaaattgtcagcgaataaaggctttatctatctatcta

SEQ ID NO: 2720 - DNA, 49 bp, Parhyale hawaiensis
  source 1..49: mol_type = unassigned DNA
taacgccgcctggacctcgtccgaagtatcatcaaaggtatcaaaggta

SEQ ID NO: 2721 - DNA, 198 bp, Parhyale hawaiensis
  source 1..198: mol_type = unassigned DNA
tgatggctctgtctttgctggtgcgggtattggcagctttaaacgatctgtacacagagctattctgtgatctcggatcttcttttttttcattcttttgttttcttcacccgctgggctggttgcgtgggggtttgttaacctcatggagtttctccgttcccacgtcgccagtctggtgtgatttaataataataa

SEQ ID NO: 2722 - DNA, 96 bp, Parhyale hawaiensis
  source 1..96: mol_type = unassigned DNA
taatggcaatagctcatagagggccggggcgtaagttccggtgtctctttgggaatgggcctattggttcgtctactgccgcctatctaatctaat

SEQ ID NO: 2723 - DNA, 17 bp, Parhyale hawaiensis
  source 1..17: mol_type = unassigned DNA
taactacaacaacaaca

SEQ ID NO: 2724 - DNA, 526 bp, Pelodiscus sinensis
  source 1..526: mol_type = unassigned DNA
tagatgggattggtcctgcctagagcggagggctggacttgacgaccttctgaggtctcttccagttctatgattctatgataaggggatggttggatgaaataacatgatcttggtaactaattgaccattcatttccagttggaaataggtcaatggagggatgataggagttgctatagggaactttctgggtgtctggctggtgagtcttgcccacatgctcagggtttagctgatcgccatatttggggtcaggaaggaattttcctccagggtagattggcagaggccctggaggtttttcgccttcctctgtagcattgggcacagatcacagctgaaggactctctgcatgttggggccttcaaagtatttgaaggcttcaatatctgagacataggtgagaggattattctaagaggggtgggcgagattctgtggcctgcactgtgcagggggtcagactagatgatcataatggtcccttctgaccttaaagtctatgagtctatgagtctatga

SEQ ID NO: 2725 - DNA, 11 bp, Pelodiscus sinensis
  source 1..11: mol_type = unassigned DNA
tgatccttcgg

SEQ ID NO: 2726 - DNA, 182 bp, Pelodiscus sinensis
  source 1..182: mol_type = unassigned DNA
tgagtctgtgtgtgtgtgttcctcctctcgagatgtttttagcaggttttatgtccctctgggtctcttttggggtctcgtattttaaatttttatatatatttgtattgtgtttttaaaaattttgtaagccgcctcgaatattttaaatagagaggcggggtaaaaatattttaaataaa

SEQ ID NO: 2727 - DNA, 381 bp, Petromyzon marinus
  source 1..381: mol_type = unassigned DNA
tagctgccttataattgtacagccatttccatttcttccagtgggttgtactcgctctcgtgcagtgcaccaccgcttcccccgaaccccctgcagcataacaaaaggcggcttaacttagccccccccccccacccacgtcccttcctggctcctcccccccccccttaacctgtatataatctcgggtgtctcagagctcttcacttgatacagctattttgctgtgactgttccacctgaagacggaagcttgtgttgcctccgaaacgtcgtgatttaatttagttgttttcatttattttattttacctacgtgactttaccgaaaaaaaccaaagagtatgaatccttgcagtcacgaaagcttcaaatctagaa

SEQ ID NO: 2728 - DNA, 432 bp, Petromyzon marinus
  source 1..432: mol_type = unassigned DNA
taacctgctgtgatgtttccatccttcctgcgattttagctgactctctgagttgcattattaggttggatgtctttgtattgacgggctggatgtccttctcgctcagtcaccgatgctgcgacatactaggcaagtcaccgatgctgcggcatactaagctcgtgcattgacatgctaatctctcacaatacaatagccacttccacagcctcagggagaccatctctagccccgccctcttaccctgaggctgcacccatctcaggcctacataagaccttgtttcagtagctttctctctctcacctgaagacggtcgcttgtgttgcgatcgaaacgtcgtgatctattaattttctatctacgtgactttaccgaaagaaccaaagagtatggattcctgcagtcacgaaagcttcaaatcaagat

SEQ ID NO: 2729 - DNA, 618 bp, Petromyzon marinus
  source 1..618: mol_type = unassigned DNA
taactggctgtgatgcttccatcctacctgccgatgttagcagttatttccgactctctgagttacattaccttgttaaatgtctttacattaacaggctaaatgtctcactaacatagctgctgctcccttttcctcgatgcggcggtggcgctcgttgtttaataggctgaatgtctctcattaacacagccgctgctgcgggagccgtctcacattgacatgctaatctctaatctcgagcaatacaatggcttcttcagcaccgtagccgtggggttacattaacagattgacatgctaatctctagcaatacaatggccgaggtatacctagctctgcgatcttacatttacttgcaaattccatctctagccccgcccacttacccttgggttgtacccatctcaaacctatataacctctggctgcagtagctctctcgctatatttcttcctgcctcagcagtccgcctgctgtattttttcacctgaagacgattgcttgtgttgcgatcgaaacgtcgtgattttattttattatttttctatctacgtgactttaccgaaagacccaaagagtatgaattcctgcagtcacgaaagctttaagtcaa

SEQ ID NO: 2730 - DNA, 249 bp, Petromyzon marinus
  source 1..249: mol_type = unassigned DNA
taattattaagtaatactgtttacaattgactgtaaaatagggatgtgcaatgacaaaatgtacctttatgtgggtatgtgggtatacttgggcagtttttatatataaaatttattgattatctttttttattttatttttatttcttgttttatttatttaaatttatgaatgatgcactgactggtgagcactttaaatttcgttgtactggtgacaatgacaataaaggatctatctatctatct

SEQ ID NO: 2731 - DNA, 496 bp, Petromyzon marinus
  source 1..496: mol_type = unassigned DNA
taactgactgtgatgtttccatcctacctgcctatgtcagctgttatttccgactctctgtgtgtctttctctctctctctgtgcatctctctccgatctctactccagtgacccgggtgctgccgcggggtccactttctgccccccccccccccccccttctctctccccccctgcagccgatctctccagtgctgccgcggtggtccactttactccagtgacccgggtgctgctgcggggtccactttctgccccgcctcctcccccccccttctctcctccccccctactgccgaggcctatataacctcgtgccacggcagatctctcgcctacttcagcagttttttcttgctgtggttgtcccacctgatgacgattgcttgtgttgcgatcgaaacgtcgtgatctattatttttctacctacgtgactttaccgaaagaaccaaagagtatggattcctgcagtcacgaaagcttcaaatcaagat

SEQ ID NO: 2732 - DNA, 60 bp, Petromyzon marinus
  source 1..60: mol_type = unassigned DNA
tgacgatcattaagaaaaaataaaaactgttgcttttcacaatgccatacgaaagaagaa

SEQ ID NO: 2733 - DNA, 404 bp, Petromyzon marinus
  source 1..404: mol_type = unassigned DNA
taaactaattttcaatggtacagtatattttttcaagtagtggtatcccaaactttcacagcagcttatttcccttcacaccaacattatgtaaactcccccccccccccccccgcgccggtccatcatgtacctcctacgtacatcatgctcatttttatgctaattcctttgtcaaggcgtttttgtttcctcccacacagcttaaaggacgcgacctgggcttggctgtcttcactccaacgctgtcctctggacagtccggtcccttcacctgatgaaggccacttgtgttgtggccgaaacgtcgtgatttttgttgttttattttttacctacgtgactttaccgaatagaaccaaagagtatggatccttgcagtcacgaaagcttcaaatctagaa

SEQ ID NO: 2734 - DNA, 778 bp, Petromyzon marinus
  source 1..778: mol_type = unassigned DNA
tgacttgatttgtgttttcttgtcaacctccaccgtcagcagtgtgggtgtgtggagcgaggtgcaaatgattgcctggcggccctttgattggtgtagacccactgcgttggcgttgttttctcctacattaacattagctgccccgcccatgctgctgacacacttgggctacgcccatctctaaacctttataaacagtttgcctttagaggctaaccccccttttcctgatgacgaccgcttgtgttgcgatcgaaacgtcgtggtttttgtttttattatatttaattactgaaagaaccaagaataagtctacattatagactgccagtacgctcactcagtttaataaccattgctacagtctacatcatagactgccagtacactcaccagcttaaaaaccaggctacagtctacattatagactgccagtacactcaccaaggttaataaccaggctacagtctacattatagactgccagtacgctcaccgaggttaagaaccaggctacagtctacattatagactgccagtacactcacccagcttaataaccattgctacagtctacattatagactgccagtacactcaccaaacttaataaccaggctacagtctacattatagactgccagtacactcactccgattaagaaccaggctacagtctacattagtggtttttttgtttttatttttatttttattcactttattttttattattatttttctatctacgtgactttaccgaaagaaccaaaga

SEQ ID NO: 2735 - DNA, 916 bp, unidentified
  source 1..916: mol_type = unassigned DNA; note = Description of Unknown:Phanerochaete chrysosporium sequence
taatgcgattcgataactgctggccgcaatggtcagaggatatttacttagcggcatacactttggttcaaacccaaaacccctaacctaagccctaagcctaaatattcattagcgtctccctcacaggcctaaaccccctggagcggagttgtacccgttgaacggtacagccagcagttatagagtattttgttgtacagcgtcattatttaatggatgcagtgagcgcccgccttcgtggcgtgggcgcttcggtgatcgccgtgatggccgcgcacgtgtcccacgtgttcgtctcgtggctgctaatagcgtctgtgatcatgtgatcttcgacccagggctgcggttaactctggattcgatgcgcatgttaatagccggcccgaatccgggtcggctccgaactgactccgctaggttcgggagactttcgccggggtggctgcgtgccggacttcgtccgggcactttgtggcgttgatccgatcagatcgagatctcgagacttcgaaaggtgacttttcggtagtccgctgcccgctggggtgttgttggccccttccgcatgacctgtacattcaaaaccttcatactttcgccgagaaagagtcccttaaggggatttgttgctcccgacctcggggagacgtttctccgcgccaatcgcattacagccgatgagagacatttcgcctctcgtcggcccgccagtcccttcgggcctggcggttgcaaggggtatatatcccagtaggaaaccgctgatgagtcttcacgacgaaagctcagcgcgacacaacagtgtcggctgccttcggttttcctgtgaagcattccgcgctcgccgctcgctacgctcgcgtctcgcgccccccaaaccctaaaccctaaaccctaaaccctaataccc

SEQ ID NO: 2736 - protein, 30 aa, Spumavirus sp.
LIAAQNQHSAGILSSIYRGKYKTTLDLTNG

SEQ ID NO: 2737 - protein, 30 aa, Spumavirus sp.
LTAAQNQHSAGILATIVRQKYKTTLDLANG

SEQ ID NO: 2738 - protein, 24 aa, synthetic construct
  source 1..24: note = Description of Artificial Sequence: Synthetic peptide
  VARIANT 2: note = I, V, D, T, S, L, E, or K
  VARIANT 12: note = E, A, P, Q, G, H, or S
  VARIANT 17: note = D, N, P, E, S, K, A, Q, Y, or T
HXLGGLTSAGKXIKNKXEILALLK

SEQ ID NO: 2739 - DNA, 439 bp, Rhodnius prolixus
  source 1..439: mol_type = unassigned DNA
taggatgcagctaaactccatagttgcgattttagttcttaattactcacacaagtactatcataactacactactaattacaccactctaagctcacatcaaataacgaagtcacattcagagaccattgtgttgttctaggaaggaatgtcagtacgcagcgctcaagatatccttatctcatggaagccacgacgcagaatgtagtagaagagtggctggcatgacgaagaaagaagggaaagaggctgcgctattcctcaaattgaatattggaaaagatagggctggtttttttccaccaacatattggtaaattgaggcgctgggagccaactgtaattgttcatgccaatatgttggttttttccagccctcatataaagtaattggttaatgtgcaaacaagaccactataacaataaataaataaataaa

SEQ ID NO: 2740 - DNA, 48 bp, Rhodnius prolixus
  source 1..48: mol_type = unassigned DNA
tagtttatgtttactaaaatttacttatttattaaaatatataatata

SEQ ID NO: 2741 - DNA, 118 bp, Saccoglossus kowalevskii
  source 1..118: mol_type = unassigned DNA
tagtactgtaagtttttgttgttctgaatgttttgttttgttattgttatttttggactttactcaagatttcattggtacgttccaaataaaaaattctatctatctatctatctat

SEQ ID NO: 2742 - DNA, 165 bp, Saccoglossus kowalevskii
  source 1..165: mol_type = unassigned DNA
taatagttgttagtgttatctgttttaacattttattgtattttttatatctgtatttcttgttattgtgttgttgttgtttttgattattgaccatggttaatgtattcccaattcattaatttgagtcaaataaaatatactatactatactatactatacta

SEQ ID NO: 2743 - DNA, 61 bp, Saccoglossus kowalevskii
  source 1..61: mol_type = unassigned DNA
tgaatccggccaccctcgtcttcggggaccaaaccggatttaaaactctggactactacat

SEQ ID NO: 2744 - DNA, 157 bp, Saccoglossus kowalevskii
  source 1..157: mol_type = unassigned DNA
taattgtaatacgtattttatatataccctttgatttgtttgtaattttgaaacttttgttgtttttgtttatttgtgtttgttttttctgatctgtatccttaccatacagcacccactgatggtgcagttgtgtaataaagttattattattatt

SEQ ID NO: 2745 - DNA, 318 bp, Saccoglossus kowalevskii
  source 1..318: mol_type = unassigned DNA
tagcaactccatcaaattagtctgcaggtagttttaatgcaatggcatatttagtagcttagtagttttattgttatactaattttcatgtattttttcctccattcttagttacatgtattcaatgttttattcgtgattctggtggattgaactgtacttccgtcttgctttgtactaaacaataacattagcttatgtttaatgtgctatttgtgatattagttgtgtgaagtattatttctgttcttgttttacaaccataaaattactctctgtagtagattttcgtgttgaataaaattattattattatta

SEQ ID NO: 2746 - DNA, 207 bp, Saccoglossus kowalevskii
  source 1..207: mol_type = unassigned DNA
taattaatataacttattaagataccttttctgttttgttttttctaaccatttcttgttcttcgtttttatttgattttattatgttttcactwtgtcttcatttgtatttttcgtcttgccattctatatgtatttgaaactttattgtatttkaaaaatccagatcctgaacaggatatgatttcaataaaggcattacttact

SEQ ID NO: 2747 - DNA, 169 bp, Saccoglossus kowalevskii
  source 1..169: mol_type = unassigned DNA
tgaatttaatgaactacacgattgtattgttgatatattatttcaagctctctttcataacctttatttgtgaatgtaatcgttattatttaaggtgacttataagtccactgggctgggcagttctctgagctgcaggtcactataataaattacttacttacttact

SEQ ID NO: 2748 - DNA, 334 bp, Salmo salar
  source 1..334: mol_type = unassigned DNA
tgatgtattgttgtctctaccttcttgccctttgtgctgttgtctgtgcccaataatgtttgtaccatgttttgtgctgctaccatgttgttgttatgttgtgttgctaccatgctgtgttgtcatgtgttgctgccttgctatgtgttgtcttaggtctcttatgtgtgttgctctcttgttgtgatgtgtgttttgtcctatatttatattgtattcattttttaatcccagcccccgtcccgcaggaggccttttgccttttggtaggccgtcattgtaaataagactttgttcttaactgacttgcctagttaaataaaggttaaataaa

SEQ ID NO: 2749 - DNA, 427 bp, Salmo salar
  source 1..427: mol_type = unassigned DNA
taataacaagataaacaatgtaaaacatacggggtctgtaaaatgtatataggttcagaacttttgtgaaatagcacagttacaaatagaaatcaaactggatggacatcagaaatagaggaaggactaaaaacaaacaaaaaataactattgtaaaatagactgtgtctgtaaaatgtgtataagatgaataaactgaaggtaaaagccgaagtgtttattagtttactccaattgggggatcggtggtagggtttgcggggaataataataaaggtatattctttaaaaaagtatgtatgtctatataggtatgtgtatgtatatatgtgtatatgtatgcatgcgtgtatggatatatatatttaccccaaaaatatatgggggattggaaatgatgcagacaattacattgatggaagcaata

SEQ ID NO: 2750 - DNA, 186 bp, Salmo salar
  source 1..186: mol_type = unassigned DNA
tgagagatagaatgatggtcaaagataaaagtaaaaatttaaaaaagtaaaaaaaacataataaaaagtacatttgaatgacactaagtggcagtgtttttacaactaatgccggtttgcctgaggctgatgccgtgccggtgtttgtacacgtgcatatacacacactctcattcaaataaacac

SEQ ID NO: 2751 - DNA, 338 bp, Salmo salar
  source 1..338: mol_type = unassigned DNA
tgaatttgcactttttaacgcactctcaattgtmatatggtaatctacctttgggcagcatgtgctggccccgccacccgagcagttgggaggggaatagggtggaataagggggggataaaggggggtataagtgggggggttacatcgacccttttttctttctacctgtccttgttctgtatgtcttgttttgtaatatttgttttgtgcccagaactctgggtcttttggttaatgtctgttctcttatgtttagataagaactgtaaacttgtcttttatacctatacaccattcttgtgtatgtgttcaataaaaaatatttgaacaaaaaa

SEQ ID NO: 2752 - DNA, 349 bp, Salmo salar
  source 1..349: mol_type = unassigned DNA
tagctgtgtattgccgctttccatgttgtctgttgtctgtagcttgtgaggtgtggaaacactttgttgtttttatggattttgtcttgttgctttttgttctatgttgctctgtctgtatgctacatcttgcttgtcctatgttgctctgtctgtatgctatgtcttgcttgtcctatgttactctgcgtgtgctcactgttcaatgattgtctatattgtaattgtttttaataacctgcccagggactgcggttgaaaattagccggctggctaaaaccggcacttttactgaaacgttgattaatgtgcactgtccctgtaaaaataaaataaactcaaactcaa

SEQ ID NO: 2753 - DNA, 374 bp, Salmo salar
  source 1..374: mol_type = unassigned DNA
tagccggctaccacccggttactcaaccctgcaccttagaggctgctgccctatatacatagactggaatcactggccactttaataatggaacactagtcactttaataatgtttacatactgctttactcatctcatatgtatatactgtattctattctactgtattttagtcaatgccactccgacattgctcgtcctaatatttatatatttcttaattccattcttttacttttagatttgtgtgtattgttgtgaattgttagatactactgcactgttggagctaggaacacaagcatttcgctacacccgcaataacatctgctaaatatgtgtatgtgaccaataaaatttgatttgatttgag

SEQ ID NO: 2754 - DNA, 250 bp, Salmo salar
  source 1..250: mol_type = unassigned DNA
tagtcactttaaccatacctacatgtacatactacctcaatcagcctgactaaccggtgtctgtatatagcctcgctactcttattttcaatgtctttttactgttgttttatttctttacttacctattattacacacatacttacctttttttccgcactattggttagagcctgtaagtaagcatttcactgtaaggtctacacctgttgtattcggcgcacgtgacaaataaactttgatttgatt

SEQ ID NO: 2755 - DNA, 209 bp, Salmo salar
  source 1..209: mol_type = unassigned DNA
tgacctagatagtttgtgtgtatgcattgatatgtaggctacgtgtgcctttttaaaaatgtatgtagttcgtcgagctgttcttgtctawtgatgttctgtattatgtcattctgtattatgtttcatgttttgtgtggaccccaggaagagtagctgctgcttttgcaacagctaatggggatcctaataaaataccaaataccaaa

SEQ ID NO: 2756 - DNA, 356 bp, Salmo salar
  source 1..356: mol_type = unassigned DNA
tagtcaaatggctacccagactatttgcattgcccccctcctccacaccactgccactctctgttgtcatctatgcatagtcactttaattaactctacctacatgtacatactacctcaactaaccggtgcccccgcacattgactctgtaccggcacccccctgtatatagtctcgctattgttattttactgctgctctttaattacttgttacttttatctcttattcttatccgtatttttttaaactgcactgttggttaggggctcgtaagtaagcatttcactgtaaggtctacacctgttgtattcggcgcatgtgactaatacaatttgatttttgatttgatttg

SEQ ID NO: 2757 - DNA, 149 bp, Salmo salar
  source 1..149: mol_type = unassigned DNA
taggctggatcatgttgttgtattgtattgttgtatgttttaattatgtaatgtattgattgttgctgccttcttggccaggtctcccttgaaaaagagactctgggtctcaatgggcttttcctggttaaataaaggttaaataaaaa

SEQ ID NO: 2758 - protein, 31 aa, Gammaretrovirus sp.
HIHGEIYRRRGLLTSEGKEIKNKDEILALLK

SEQ ID NO: 2759 - protein, 31 aa, Gammaretrovirus sp.
HVHGEIYRRRGLLTSEGREIKNKNEILALLK

SEQ ID NO: 2760 - DNA, 683 bp, Schmidtea mediterranea
  source 1..683: mol_type = unassigned DNA
  misc_difference 366: note = a, c, t, g, unknown or other
  misc_difference 525: note = a, c, t, g, unknown or other
taactctgatacttttacttaaagattaaaacaattttatagcaaaaaaggaaaaccttcaggaatgaaaatcagagtagaattgtatttaggtcttgaagttgtttgtggagggttgtttgaaggcttttttgttgcgtttttaagaggaaagctttttcatatacatctttcataagactttaaaaactcaggaactatttattaatttgctctgaattttataaaaaactttctttagttttaattttattaagaaatttgaaagacaaaaaaaaatgacgttagaagcagttatttaacataagatatagaaaacattttaaaattttaaagttttatataaaaaaattaaagtttataaanattaaattaataaatgttaaattaaacaaaaaagagaggaaaaaaatttattttaaaaattttaaattgtatattttataaaagatatttaaatttttaaaattttaggtttaaaatgttttaaaattaaatttaaaccaatcaaaaagcaaaaaagtnaattttaatgaaaatcagaaggtatttcggcatttttctcattgtatatagtagttccgaaagaaactgaagaggattatttaataatcgaaacttttttcaaaaatataattattacttcgcagcaagggcttattttgttaaataataataataat

SEQ ID NO: 2761 - DNA, 78 bp, Setaria italica
  source 1..78: mol_type = unassigned DNA
tgatttgtggctcttgttgggtttcaactctagcctaccccaacttgcttgggactgaaaggctatgttgttgttgtt

SEQ ID NO: 2762 - DNA, 277 bp, Solenopsis invicta
  source 1..277: mol_type = unassigned DNA
taggccctcaagccctgccgggggcgcccatcgctagggcgcccctggcgagccgagtcggccgccaaggccgaccgggtccggggggctccggaagtatgctgcacgcgttcccggagccccccagtcatggaccagggcaggacacccggagaggttttagtgggtaggccctcgccggcacgtcgccggcgggggagagccccacataaccaccaggcctcccccggggcctggggtatgcggtaacgcatttcctctccgtgaacaaaaaaaa

SEQ ID NO: 2763 - DNA, 306 bp, Strongylocentrotus purpuratus
  source 1..306: mol_type = unassigned DNA
tgaagtggccggagtggcaatgcctaaatcgaatgcggacgagaatggggcggtgtaaggtcaatatggcaagatggggctatgcccatgaaggagatactctctgcgactgcggagagactcagacgatggaccacctcttgcagtgcggcggaacgggttgcacagatgaagacctgtcccttgttaatgaaacggccattgcagcaatcgagcgatggaagaacttaatttaatttaatttacttctaagttaaggaactttacattactatcttgatctaaggagacacgaacgaacgaacg

SEQ ID NO: 2764 - DNA, 660 bp, Strongylocentrotus purpuratus
  source 1..660: mol_type = unassigned DNA
tgattgtatttaatatactctgaaacaaattaaattgtcaaattacaatttcatattccttagtatataattaattcataaatttgaggtctgattttttaccaagttagtcaatgtattttttatgacatgaagaatgcgatgcatatctatatttatattttaatatctctaatgttcgccttataatattcatatttgtcttgcaatgtatctttgtattttatcagcatgtacataattgttttccctctctgtccatctgtcccctttctcccccctctctctctctctctctctctctctcttctctctctctctcttttctctctttctttctctctctcctgctttcccatctctctttcttttttaactcaaatttttaaattgaaatattgtataagattaatggtatatagtatatacacgctcttcataattatgtagattgtagtgtgacatcttgaaatgtatacttgcttttttccagcaatttactcatgtgcaattcagttactttttactgtgatatctcttgaaatgtataattgtcttcaccatcaatgttttattcatgcgcaattcagttacttgtaactgcgatacatggaaatgaatcaataaataccatttatctatctatctatctatctatca

SEQ ID NO: 2765 - DNA, 48 bp, Strongylocentrotus purpuratus
  source 1..48: mol_type = unassigned DNA
aaatgaaggcggtcattgtcgcttcgcgacagacagctactactacta

SEQ ID NO: 2766 - DNA, 395 bp, Strongylocentrotus purpuratus
  source 1..395: mol_type = unassigned DNA
tagtataacaaaaccgtgacttatttattctttatcatgcaactgcttactgcacctgcacttgcaccgcaccctcttgatcactcagtttttcgaagagagttatgtcgccaattctttttacgaggccgccatccatctccagcctaaccgctcacgatggtggtctcctgcgttctaaattacctctctaatttattgaaaatatttcatattatgttattgtatgcttcgtacatgtttatcgtatgatataattgtacatgattttttatttaattacttttgtaaacattttattcattgtatttgttattgttcgaatttttgtactttgaatttgaatttgtatatttttgaacgcagaaataaaatcaatcaaacaaacaaacaaa

SEQ ID NO: 2767 - DNA, 170 bp, Strongylocentrotus purpuratus
  source 1..170: mol_type = unassigned DNA
taaattccggcaacgttttttttttactggcactatgtatatatacacctctcacctgcacacctggacatccccatgtcgccacacacatgcactcgcacacatctgcaagaatcttcagcagtgaaggaggcagattattttgaagaagaagaagaagaagaaatata

SEQ ID NO: 2768 - DNA, 42 bp, Strongylocentrotus purpuratus
  source 1..42: mol_type = unassigned DNA
tagatgatgtactccctgatattctttgcacgaacgaacgaa

SEQ ID NO: 2769 - DNA, 141 bp, Strongylocentrotus purpuratus
  source 1..141: mol_type = unassigned DNA
tagaatacccgacgcagaactgagccagacacttaccaagaagacacccaactacgagaaggaagaaaatgaaattgaactggaagcccgactgctgagaacacagcattcttccagaatctcgggtaaaggtaaaggtaa

SEQ ID NO: 2770 - DNA, 585 bp, Strongylocentrotus purpuratus
  source 1..585: mol_type = unassigned DNA
tacagtctttctttaggtcaagtatagttttgatggtttgtttgttcttttgttcattttttttttttttgttagtatactttttgttttgtttgtcttattacattatattccattatgtttttgtttgtccaatggacgattatggcgtattttgttagtctgcatatatcttaacaatccaatcacaactcacttacatgtacaaaaatgaaacttataatttcttttttagttaagacaataatgtatttaaaaaaaaaaaattgtaaaattattttttgtttttatctttctttttcttcgtgtttgtatttagattgttcatgtggtattttccacttttcatgtatgcttgccatattgtataatattgtatttatgtttagcataggctaggtttagatcattcctatttatcgttatacttttatattgttgttttgttgtattctgtattctttgtattattaagctatgtttgtattctttattatgtatcattatcatgacatgtacatgtgttgtactctcataccccagaagggggtcgaatgagtcaataaattctattctattctattc

SEQ ID NO: 2771 - DNA, 1033 bp, Strongylocentrotus purpuratus
  source 1..1033: mol_type = unassigned DNA
tgaactttgtataaactctaatagaaggggcaaacagactttagtatgactgattttaaatgatatttgcatgtttttaattactcactttgaaattaaaataatgttttttaaaacatatagtttgggattattactattgcctatttccaatgcatgaaaccttcgggcgtagacgcggaggagtggtctattgttagtgaggaggatgtctgttgttgttttctttgttcatcccctcacttcaatagataacctaccgtgcctgcgcctgccaacatggttatgttttaggatcttgtttattacatcccagcctttttaaatagatttaattcaccttagctaaactggatcatgtttttttttactctttactaattaactggataaatcactcgagcattataatacatgtaccatatttaaagcatgacctatagtatttattcattcacaaaaaatgtgatttcatagaaaattgaacgattaatgctaaacatagatttatatttttgtaattttccacacgcaacactactattttcagagttgaaatgttctaaaccagttaattgccatgtacagtattacgcatgtatttcttgttaagtatgtaatgttttaatcatgtaaaagttatcattttcttatactccctccccctttctttctctcctccgccatacctgtccttttgtattcattatttcactgtgaattgtgctgtatattgtatgcatgggtgttgatccgttgcgtcgtgctattcatcaggggggtatatgatcttactgtttcgtgccccactggtgactggggtggcgcagcggttcgacgccggtgccaagagttgcattattatctatagtagtttattattagtaagtgcaattttaccttgtaataattaattctgtaatccattgcgcaatttagtttttagctacgaagcatggaattaatgaacatttattgtttacatgtttgatttgatttgaataaaccatttatctatctatctatctatcta

SEQ ID NO: 2772 - DNA, 121 bp, Tetraodon nigroviridis
  source 1..121: mol_type = unassigned DNA
tgatgaagccttttggatagaaggcgaaacgttttccaaaaagaaaattgaaaagtccagatgaacacagaatcttttctcggataactatgacctggatgactgagaacctacacagaca

SEQ ID NO: 2773 - protein, 31 aa, Gammaretrovirus sp.
HVHGMIYRERGLLTAGGKAIKNAPEILALLT

SEQ ID NO: 2774 - DNA, 120 bp, Tribolium castaneum
  source 1..120: mol_type = unassigned DNA
cttatgtcttaaaattatttttatgttattgttatttctgtgtataatactgacgtttttcgtatcaattttgttactacatctgtataaattgatagaaataaattattattattatta

SEQ ID NO: 2775 - protein, 31 aa, Gammaretrovirus sp.
HVHGAIYKQRGLLTSAGREIKNKEEILSLLE

SEQ ID NO: 2776 - DNA, 275 bp, unidentified
  source 1..275: mol_type = unassigned DNA; note = Description of Unknown:Trypanosoma brucei sequence
taataaacgaataacaaaaatcaaaacaaaaggattgctaattgacatcttttggagagtccggggtggggggcttctcgccccatctgctgtattccgttcaactgcggagctacaacaaaaattatagagggtgtgttaggctgaataaaaaagggagactctgccacagtcgccagaccgatagcatctcagggctctacggtgatggctgatggccgcgccagtggggggaaactctcacgaaggcacgaagaaaattccaaaaaaaaaaa

SEQ ID NO: 2777 - DNA, 399 bp, Xenopus laevis
  source 1..399: mol_type = unassigned DNA
tgaccttactatataccacaacgttacacacccttgtataaataaatagccattggatacaattgttctctatgagcacatctgcactttatcatgttctttatcatgttcttactactatcatatcacaatgatacacccatcatgtctgacgtttagcattatttacttaacatattacatctgctgagtgtgcactgtcttgtcctgtccctgcactgtgctgtcctgtcttgcaggagttgcatatttttgcacttgcactttttgtctgttgtccggtacatctatgttgtgtgtagcaccatggtcctagaggaacgttgtttcgtttcactgtgtactgtacaaacgtatatggatgaaatgacaataaactcactcttgactcttgacttg

SEQ ID NO: 2778 - DNA, 330 bp, Xenopus laevis
  source 1..330: mol_type = unassigned DNA
tgaactggcacttatataacagtgtaacaaactgtaacccacagcaccttaatacccctctgaattgtgtctgtatgttaccctcccatttagactgtaagccctacggggtagggtcctctagccttttgtttccttgacactgagcacttaatctgtattgtaattatattttatatttatgtgaattgtatttctaataatgcacttattgttactttttattccaatgaccccttgtttgttactactaatttattgttttgctgtacagtgctttgccctcaaggagcgctatacaaataaaaatatacatacatacatacatac

SEQ ID NO: 2779 - DNA, 309 bp, Xenopus tropicalis
  source 1..309: mol_type = unassigned DNA
taacaccttcatcaatgagaatcttggtaccattgtgattggatcataccttcttacacctgtcagtttcagctaacacctaactgaacaagttcaatggaaccattgtgattggatgtctgtgactctactaccatcaagagtttaaataccggggaattccctaccagtcatttgaactgaagaagccactcggatgagtggtgaaacgttttcaagaaaaactcagaaaagtccagttgttttagacttaattctactagatactgtatatcatgacctggatgaatgagaatcttcatagacata

SEQ ID NO: 2780 - DNA, 263 bp, Xenopus tropicalis
  source 1..263: mol_type = unassigned DNA
taacacctgctttgaagagttgcatgatacttgggtaatcctttcaaagtaactccacagcattcacacctctgtgagtttcagatgtcacctttctgaagagttacatagtgccattgtgattggattagtggaagagtatatatgctgaggacttcccataccagtcagttgaactgaagaagctgctcggatgagtagtgaaacgtcttcaatgattactaaacaagtccagttgctttaaatttatttatactagatat

SEQ ID NO: 2781 - DNA, 317 bp, Xenopus tropicalis
  source 1..317: mol_type = unassigned DNA
taaaacattattttgcctagtcctgcgcttaagggcaaatgcccatacctggtgcactcttaccttccaatttgtgcctgtatgttacccaaccacttagattgtaagctctacggggcagggacctccttcctactgtgtctcataccacatggcacttattccctgtgcatttatatatatttattgtatttatttattataacacttgtcctccctgtgtgtaattttgtattttgtaagattgtacagcgctgcgtacccttgtggcgctttataaataaagttatacatacatacatacatacatacataca

SEQ ID NO: 2782 - DNA, 148 bp, Zea mays
  source 1..148: mol_type = unassigned DNA
tagagtttttatagatgagtcagtctatgctagtttcgttcaggccgccgtaaggcgtcagttgtaccccggtctattttagaccttgtttatttcttcttttaatataatgatacgcagctctcctgcgtgttcgagaaaaaaaaaa

SEQ ID NO: 2783 - DNA, 153 bp, Zea mays
  source 1..153: mol_type = unassigned DNA
tgattaggccttttcccttttagtgctctcaaaagcttttcccctcccctttctctctctttctctttttggtgacatcttgttgggtttcaactctagcctaccccaacttgcttgggactaaaaggctatgttgatgttgatgttgatgtt

SEQ ID NO: 2784 - DNA, 166 bp, Zea mays
  source 1..166: mol_type = unassigned DNA
  misc_difference 41: note = a, c, t, g, unknown or other
tagctagcattgtggtaattcgtgttagtttcttctttagncatggatgggtttctgtatgcctgttactggccgccgtaggcgcctcttttgttttcttctgtaactgtccttcttctttaatataatatcgcgcagttctcctgcgctttcgagaaaaaaaaaa

SEQ ID NO: 2785 - DNA, 3999 bp, Zea mays
  source 1..3999: mol_type = unassigned DNA
tgatgataggcctcatttggaattgtcagggtttagggaatagttctaaggttcagtttctgaaagaactcattagagatgagaaagttgactttattggtttgcaagaaacccaaaaaagtcattttagtgattcttggttgacttcgctggctggtagtaaaccttttgcctggttttctgccccgcctaatggtagatctggtggtttattggtgggttttaatactgatgtgtttgatgtgagagaaaatgaaattggtgaatttatgattcgcaccttgatttttcatagagaaaaaaatctcatctggaactttgttaatgtgtatggtgctgctcagaaggagaacaaatgcagattcttgagtgagctttcgtctttttgctcgagaagtcgtgctcctttgcttgttggtggtgattttaatattattagaaaagcagargagaaaaacaagcctggtggtgttaataagtggagcttcctttttaacagtatcattgagcaaaatgggcttgtggagtttgacttgaacaatagattgttcacttggtctaataatcggattgaccctacttttgaaaagttggatagatttctggctagtcctgagtgggatcttgcttataataatatcaatgttcgtggtttgaatagatccttttctgatcatgttcctttatgcattcaaacggatgttatccctactggcagtagagttttcaaatatgagttatgttggaaggttagaccagattttcacaaaaaagtgatagacaattggtctattcctgtgaaggctaaaggtagtattgacatttggaaaacgaaaattaaacgtttgaaacaaatgctcaaaggttggaatattaatgttgaagggcattacaaaaaatgaaaaaagaattgttggcaaaaattgacatctttgacaaaatcagtgaagtggttggtctttcagaaaatgacaggatggagaaacttgacctggaattgactctcaaaaaattagttgatgaggagggaattaagctcaaacagagagctcgtgataaattcattttggatggcgatgagaattctaaatattttcatcttttagccaagtgtaagagaaggaagcttaaaattgtgactcttactcatgaagacaaagttgctcaagatgatgatgaaattaatcatttggcgacttctttttaccaaaatctgtttggtccttctcaagaatctagtatttctttgaatcatttgaatatgaaaatgttggatgatactgacagagattgcctgaccagaccgtttgacatggaggaaattagagaagtggtgttttctatgaaacataatagagctcctggtcctgatagcatcccagctgaattttttcaggagttttgggacacgattaaaaatgatctgtttaacctctttcaagattttcatgatggcactcttaacattgagagacttaattttggaatggtgactcttattcccaaagttcctaatgctattgacattaaagctttcagacctatttgcttgcttaatgtgtgttacaagattattaccaaagttttgaccaacagattggccagttgtatcaataatgtgattagtgattttcagtatggttttatcaaaggtaaatacatcatggatggagtggtctctctccatgagattattcatgaggtgaaaaagaagaagcagagtggggtgatttttaaggtggattttgagaaagcttatgacaaggttaattggaactttcttcatcatatgatgattaaaaaaggttttggtgacaaatggtgtgactgggttatgagaactgttagaggtggtaaagtggccatcaagacaaatgacagggttggtccctattttaccactcacaaaggtgtcagacaaggtgatcctttctccccctgctttttaatattgctgctgatgggcttgcttgtatgattcaaaaagccaaagatgaaggtattattaggggactcattcctcatatcatccctaatggttgttgttgtttgcaatatgctgatgataccatttttttgcttcaagatgatctggagggagccagaaatcttaagtttattctttgcttatttgaacagatgtctggtctcaaaatcaattttcataaaagtgaaattttctgtttaggtgaagctgttgataaggaaatgtggtatgctgacatttttacctgcccttataattgtcttcctatgaaatatttgggggttccgattgatgacaaaaaactttgcaagtccttgtggttacccacagtagagaaagttgaaaaatgggttcttggcaaggaaaattccttagtttgggtggtcggttagtcttgattaatagcagtcttaccaatgtccctttatacatgctctcgatgtataaagctcccaagaatattttgaagaaaatggatctctttagaaaaaggcttttgtggcaaggtggccatactacaaaaaaatatcatttggctgattggaatatggtttgttctccgagaggtcagggtggccttggggtcttggatctgcacaagatgaatgaggcgcttcttgctaaatggatttggaagttggaaaatacgaatgggctwtggcagaccattatcagacataaatatgttaaaggaaggcctattatttcattaaaaaaagacaaagtgattctcacttttggaaaggtattctggatgctcgggacaatttttacaaatattgtaaaaaaaggtaggcaatggcaataataccagcttttggcacaatatttggtgtgatttagaacctctgtcttctaaatatcctagtttgtttgatattgcttatgataaagatatcacagtggaaaaagccttttcttctgattttagagctgtgaattttagaagaaggatttatggtgctttggaagatgattataataaccttattacacagtgtaataatattactatttctgaggaggatgataaatcagtttggcttctgggtaataaaggtttttctgttaattctttttacaaagaaatcaaatgtgctcagattcctttgccttctagtttcttgtggaagactagactcccacataaaatcaaagcttttttgtggcttgttatgcataaaaagattttaaccaaggataatttgttcaaaaaaaattggaagggcaatctggattgtactttttgtggattttcagaatccatagatcatttgtttttcagtgctcggttgctagatttacttggagaatagtctactcggctcttggcttaatttctattcccaacagtgtggatgatctgtttggctcttggattaatagttttaacaaaactgaaaagaatctggtcctttttggttgtggagctgtcatttgggcgatctggcgatgtcgcaatgattgttgctttggaactgacagaattgatgatccgactaatgtgattttctcttgttgctattggcttgatacttgggctatccgtcagaaaaagaaggaaagaaaattggtggaacaaggaagcctcaaaatcagaaggatggcgtgtgagatctacaacaagactcgtggttggaagccagtcgacagacggatccaatgaagattctgctgtgtttggctattttggttcatcaactttgtgtttgctgtaatcccccctcgcctcggtagcttcaggctactgaaaactttgggctatatcggggytgaagttgtttagtttcgtgctactctagtttgatctttgcgatctttgtttttggtcagctatgtgctgattctgtgctgcttctggtagtttggttcgttcaggtttagttccgtcgtagctgatagttgtgtgtcttgtcggcttttaaattctggttggctctatggtcttgtaagaacttgtgtctctttctatttcgtaatgaaatagggggttatcccctctgtcaaaaaaa

SEQ ID NO: 2786 - protein, 908 aa, synthetic construct
  source 1..908: note = Description of Artificial Sequence: Synthetic polypeptide
MPNLKTLTKELRQEIVSYLYPLPSISSNLAFRLAIHIFTKTRFSSHINFISRCLQHKVIPKGFRSNFHASIFSNVSNFNLKYLHEIQRTQNTFSHNIMRSTIRAMCSKRNELNKQIIECRSQLSNVCPSVLLRSIHAKIQALNSKLFHHLEQTKKHKLENLTNSPKNRTEPLENQNHHTVVTIPENLPLSNAEKSVLSKGLNFVPISKKSDEFTTRQDVEKFLRRVQLKAFFHNKEDKSDNTEKDAFETLTAKKSKWTPPEGQFASIDYFIKKCRHDVHKLKSNCNTKLSNLSKEEWTALINLKNRKDLVIKAADKGGATVVWRTDLYQQEAIRQLSDPTFYTKVNKDLTPANQKIVKDTIQELIRKQELPVTAQNLIITTPRTSCIYFKPKIHKPNNPGRPIVSACSCPTELISSYLDKVMTPIVKSLPSYIKDSNHALETFGNFNFSGENKIIFTMDITSLYTVIPNNEGLQALKYFFNQRPIKKPSSETLLRLAELVLTLNCFSFGDNYYKQINGVAMGTKMGPSYANLFVGFIENKFFSNYHGPKPDLYKRYIDDCVGATSSTKEELNLFINSVNSFHPALKYTWEISENSLAFLDIKLSINGNGLSTSVHYKPTDSHNYLLHSSSHPQHVKNAIPFSQFLRLRRLCSDDTDFNNKCEEMCQFFKKRGYPDSAVTTGKHRAQEIDRETALQTSQNEETDRIPFTLTYHPQNLAIKNVILKNFKILSNDPETKHIFSLPPLISFKRDKNLGNFLVRSAFKFNNKPGTFTCKRTRCKTCPFISNTVNISGPNRSVKVTDHFTCISSNVIYCITCTLCKKIYIGETGRRLADRFREHLRDAEQNNTDASKPVARHFNLPNHSHHNMTICGLYLHHGNTESRKNLEQKLIFQLGTLSPHGINERLSFH

SEQ ID NO: 2787 - protein, 690 aa, synthetic construct
  source 1..690: note = Description of Artificial Sequence: Synthetic polypeptide
MRLAEYFFDENSNNRTANEHDTPFHNKSTWNPPNDRERALNTFLDAVKLDITTTKPKPTQDNLTVTERQAIGQLKQRQDIIIKPADKGSGTVVMDKTWYIDECNRQLTDTKFYQRLDEDITADIQKRVTFYVNRMHKDKLINDKTKQYLIQSDVKPGRFYILPKVHKPGNPGRPIVSSNSHPTERLSHFVDYHLQPLVHKLPSFVKDTNDFLNKLLTIGNLPANSLLVTLDVSSLYTNIPHNEGINACERFLRTSSHKTIPTSTLCDLIRMILTMNNFSFNDNHYLQIHGTAMGTKMAPSYANLFLGFFEANALKNAPFQPHTWLRYIDDIFMIWTEGLDNLKIFIDYLNNIHSTIKFTSSHSSTNIPFLDVNVSLTNDGNISTDLYTKPTDKHQHLLYSSCHPLHTKKAIPFSLALRLRRICSTDATFHTRTAQLATYLLKRGYNRNFVNKQIRRAADIPRQLTLQTKDINKPKRIPFITTFNPSLPHISHIIKKHFNLLLSSNRCKSVFQHPPVVAFRRSPNLRDLLVTAKLSPNSTNPQLPCGSFRCGKNCATCPYISHGLTTYTFFSTGETRPIKFNFTCETKNLIYMIQCNRCNLQYIGETKRRLKDRFNEHRRTIDNPNNKSKPTTAAEHFLSSPNHTANDMILIPIEKIFSNRDSIRKAREAFLIQKGRTIDPDGLNIREETY

SEQ ID NO: 2788 - protein, 795 aa, synthetic construct
  source 1..795: note = Description of Artificial Sequence: Synthetic polypeptide
MTPGFKPFTILRSLGRQSERLANNYISYASNVRRIRQQLWFNHRCKDLRLVPSGLRLKSPLNTQEAIQIVKATCRRLIRARINDCHRRLNHYNNRLQQRLDKLKQLIPTNLLDVIRDIADQRAKKTTEQYRIKTELKLTRLQRTKNKKRHKTDENWVRNISSRPLDKTETQVLSYGLKHSVTPKRIPTETIVSSVEAVLSRQRDLSEPTKDNIRSRIASTIQSASLTDNNLTKDERQALKRLRNDNDILILPADKGRVTVVMDKTDYHDKMDELVNDKQTYEVLKRDPTPALQRKLNSKLLQLKKADAIDIRRYNRLRCPVPQPAKLYGLPKLHKPNVPMRPIVSFCGSPTYELSKYLTTILKPLTDESRHKLQSTETFIDAIKTAQVPDDHKLVSFDVKSLFTSIPLQLALDCTETAINNSTLQLPLLTNDLMDLLNLCLTSTYFQYNGQHYKQLHGTAMGSPVSVVVAEIVMQNIEEQALASYKRTIPLWLRYVDDTFTTLHKDEIDDFHEHLNRQNAHIQFTKEIEDNGKIPFLDCLVIRDNNRLQTTVYRKPTHTDRLLDESSYNPSSHKATTIRTLTRRALLVCNSHDSLADERKYLDNVFSKNNYNCDFVTRNTYRTEPNETNTNLTPTTTVTIPYIKGTSEIIARILQPYNIRVAHRPITTLRKLLTNVKDKDQPRDRQGAVYKIKCCDCQATYIGETGRNLNTRLTEHRRATRNGDINNNIAEHHLQTNHRIDWDSATCVTYNTNYYQRIVLESWFTNLEQTPINRCLQLPAPYKRLIDDINRQTTH

SEQ ID NO: 2789 - protein, 1286 aa, synthetic construct
  source 1..1286: note = Description of Artificial Sequence: Synthetic polypeptide
  VARIANT 490: note = Any amino acid
MPGPALGGAPLESATRTLCPPNGFSQTYFSTAAPSPLPVVGSTPGPTLGGALSGSVSSTFLGSTNSKETSLSSFPVPALPTSHNFILQWNLNGYRSRLCDLELIIQNNQPWILALQETNNISADEMGRTLGGQYAWTVKRLANQRHSAAIGILKGIPHKILDLPSDLPIVGIQLLGSPSVSVACAYLPGGNIPNLHGQIQNCLQALPEPRIFLGDLNSHHPVWGSPKADKRGSTLINAFEEEDMLILNDGSPTFFNGHFSSEIDVTAVSLSFARNIQWSVSSDLHGSDHFPIRIALTTGASIPKNTRRPRWKYDKADWAEYDLLIRSALRNSPPDNMADFISTIVESAKATIPRTSSTPGRKALRWWSDETKTAVKARRKALRQLRRLPLDHPDRQSTLENYRKLHLECRNIIGDAKKATWESFLESMNASQTTSELWNRVNALNGKRKTTPLTLQVQGNAISDPEAVASELGKYFASLSAIESYETHFXNSVKPSTSAINNFIIPPNTADPEMEQPFSARELSFALSRSNGRSAGPDEVGYPLLKNLPSVGKLALLDLYNKIWANNDFPPAWKESLVVPIPKANIPTRDPTKFRPISLTCCAGKVMERMVNRRLRYHLEANGLLDFRQHAFRQGYGTSTYFAGLSDVLKEAYDKGNHAEVISLDISKAFNRTWTPLVLEQLAAWGIGGRTLHFVRNFLADRTFQVVIGNTKSSTFPEETGVPQGSVLAVTLFLIAMNGVFSRLPKNIYVFVYADDIVIVVCGSTPTMTRIRAQTAVKSVAKWASDNGFQLSASKSIRCHICPSGHRITGPDITIDGQPIPLRKTVRILGVIVDRALSFRQHFDTVKSACRSRLNLIKSISRPHRSNNREIRFRVARAIVDSRLVYGLELTSIAMDRLVEVLSPIYNSYIRIISGLLPSTPSDSACVEAGLLPFRIFIRSSICCKTAAFLSKTAGEDRVFLLDEGNRALSTAANLSLPPVTRVHWLGDRSWRSVPPKIDNKIKNSFSAGSNSAALRRSVAELLQTSYSDFALRYSDGSLTSAGVGIGVAGDIPDVSMSLPSQCSVFSAEAAAAFIAATTPSDRSILVLTDSASVISALQSDSPTHPWIQAILKYALPDTVFTWIPGHCGVPGNEMADHLARSGLSGQRYTSEVPFMDLKRWIKSTFRQHWEDSWYRTRTLFLRKIKNSTTTWSDLPILKDQRILSRLRTGHTLISHNMGGGPFHKECESCHIPASVDHVLCACPMYEHLRQIHGLSDNIGEVLRDDATTIAALLSFLRDANLYSSI

SEQ ID NO: 2790 - protein, 955 aa, synthetic construct
  source 1..955: note = Description of Artificial Sequence: Synthetic polypeptide
  VARIANT 261: note = Any amino acid
MKLEILGLSEVRWPNFGEHRIPSGQILLYSGLRGEHAPRHRGVGFLLSAQAYAALMKWEPINERIIVARFRTRVRNLTIVQCYAPTDAAELQDKENFYSQLNAVVDKIPKGDIKIYMGDFNAKIGSDNSSYEPVMGRHGLGEMSENGELLAEFCGNNDMVIGGSLFPHRPVHKVTWVSRDGFTENQIDHICISRKWKRSLLDVRNKRSADIASDHHLLIGEVRLRIARIRRQEERVGRRFNTRRLEDATVKRSFVEELETXAANISEGGSVEEQWTAIKNAFITTSENNLGELRTRRKQWITDETWRKIEERREAKAAIERAKTRGAKALSRQRYSALEREVKRSCRRDKRAWADSLADEGEKAAATGDIRLLYDISRRLSGAKMNTTMPVKDTTGQLLTDPTDQLKRWFEHFEQLFQVSTRPPTPQHDPPRVRRISRVNTEAPSLHEIETAIQSMKSNKAPGVDRISAEMLKADPAISAQLLHQLFRNIWDTATFPADWMQGVLVKVPKKGDLTVCDNWRGIMLLCIVLKVLCKVILNRIQEKIDATLRRQQAGFRAGRSCVDHIVTLRIILEQVNEFQESLYMVFIDYEKAFDRLNHENMWGALRRKGVPEKIIGLIEAQYEAFTCRVLHNGVLSEPIRVVAGVRQGCILSPLLFLIVIDEILIGAIDREQNRGLLWQPITMEHLNDLDLADDIAILAQRRSDMQSKLDDLAERSSAAGLNINVNKTKSLDVNTAGPSSFTVAGQTVENVENFQYLGSQLASDGGTKIDIGARIKKARAAFASLRNIWKNSQISQRTKIRIFNSNVKSVLLYASETWCVSAENTQRLQVFINRCLRYIIRAWWPHNWISNADLHRRCHQQPIQTEIRQRKWGWVGHTLRRGGNEICKQALEWNPAGHRSRGRPRGSWRRSLNKEIKEVDGNLTWPQVKAIAGNRPGWKSFTSALCTRMGAQDP

SEQ ID NO: 2791 - protein, 797 aa, synthetic construct
  source 1..797: note = Description of Artificial Sequence: Synthetic polypeptide
MASTLSESNTFIKLKKSIAGLKKDIAFLSECRKLNLTPKSHKIKVRGQVPQDIIKKMESEYLRSSIKKLHSKLNSQTLKCYSLHLKLAKQYPWEFPLFLTKVIQAEECEARRKKDIHSKKLAILKNKQHNKVVTALPKVHSIEGFVVNRSTQQFSEEQLTLLNKGLAYAVATKPDIEQTIIDVETAITHTIPIEFQESARNDTEESLKGNKFQLRGQNSDEDKVLSELRDKSVYYVKADKGNAVVILDKDDYDNQMNEKITTGPYRHFRVDPLPTMVRHVEKTLKECKPLLGDNTSRLKVSNPVLPRIKGLPKIHKPGNEMREIISAEGSPTHKLAKWLVKEFQSMPKPFESRSVNNTQEFASQLQASGYIQDDEIMVSFDVKALFPSVPVKEAINLLEEWLLNQHNESNWKNKVRYYIKLTRLCMEENYFSFRGNFYKQTKGAPMGNPLSPFLSELFMANFESILKKKDLLPQRWWRYVDDVFSIIKKDYLPKILEAINSIHKDIKFTHEEEKDNKLPFLDLLITRESSHFEFEIYRKPTNTMRVIPSTSNHTYQHKMAAFHHMIHRMQTLPLSETGKSKELDYIFETARLNGYRNSTIQAVVDKRARDKYRKSMTTLTAEKEDLKRVAVNFDTKITQPLAKKFRKYGVDLVFSSRSSQLKSRLGSTKDKINKLNRAGVYKISCPHCNKIYIGQTKRTLEIRFKEHIAEVKKADKELEKGLAYDFKSKVAEHVFQDGHQMTSDNIDIVRSVSSSWKLDVAESLEIYKQKPSLLLNRDQGNGQSRLFKFVPKKYKRA

SEQ ID NO: 2792 - protein, 775 aa, synthetic construct
  source 1..775: note = Description of Artificial Sequence: Synthetic polypeptide
LDNFAFRGLKQRNLLRNHLDRTLDLIFTNDAITDCSSVDEACQPIVDIDPHHPAFVLTVRSPTIVPFVEVSDEEVRDFGKVDYETLHVLLSRVDWSTVYQCNDVDNAVSIFNGKLHECFTHCVPLAMPRRKPAWSNARLLYLRRNQSKMQRRFSKRKNDCNKLAFNRASRSYRYYNRYLYGKYVRRVQDNLRRHPKQFWSFVNSKRNETGLPSFLSLNGHSASSAEGKCELFASWFASVFDTSSQSQADPDAASQSLPTDIIDVDIFEVSHMMVEEALKKLKPSISPGPDGIPACILKHCKAVLIAPLKAIFNLSLRCQQFPKAWKMSYMRPIFKKGSRTEVSNYRGITSLPAGSKCFEIIMNDVLLQACKTYISQNQHGFFPQRSVISNLCEYTSFCIKEMDKGGQVDSIYTDIKAAFDTVDHSILLAKLNRLGASSRICSWLYSYLTDRQLLVKIGKAISAPFTPHCGVPQGSNLGPLLFVLFFNDVSHVLSNCYLLFYADDLKIYLIVRSINDCRQLQEQLDLFVSWCTLNHLSISVSKCCIISFRRMKSPVLYNYAINGTILNRVDNVKDLGVLLDHQLTFKMHYSETVDKANRQLGFIFKIASEFDDPLCLKSLYCSLVRSILEFASVIWSPYDAVWIARIESIQRRFVRCALRSLPWSDPLRLPPYEHRCALLGIETLEERRKMNQAVFGAKVLRSEIDSPALLRQLNIYAPQRVLRSRQLLYQPPRRTMYGSNNPIDTISRRFQDNYNLFDFNISTNTFKNRLRNRQV

SEQ ID NO: 2793 - protein, 746 aa, synthetic construct
  source 1..746: note = Description of Artificial Sequence: Synthetic polypeptide
SQHQRGGGVLIAVKKALQSNVILINDANQLEQISVRITYGTMSLVVCTVYLPPNTEPALYQQHAASVNQLCKLLGTQDEIVVLGDYNLPYLRWRFDDDIGAFLPINASSEQEISLVEDIVATGLMQMNHLLNSNERLLDLAFVSNASVCELLEPPLPLMKVDRHHTPFVLTLDVIQTPLENRKNETFFDFRQCNYDELNAEIAQINWRDILAFGSLDDAVTRFYSELNVIFERHVPRRSRACRPDNKQPWWNAQLRNLRNRLRKARTRYFRVRNRLNRDAVRDLESQFNELNVSCFQSYIDRLESNMKDDPKQFWSYLRSRTTSRGFPQLINYDGKTATTPDDAVKLFSSFFQSVLSITPPPSSASYLSALKTFDLNLQPTSFTQHEVYKKLCSIDGSKGPGSDGLQPSFIKACSASLAEPAALLFNRSLAESVFPAKWKEALITPIHKAGNVHDVKNYRGISILSCLPKVFESMLLDFLYPAVRHIITEDQHGFVRKRSTTTNLMSYVSTLIDKIEKRQQIDAVYVDFTKAFDRVPHQLAVEKFQRMGFPDWLTKWVLAYLINRSASVRLGTTLSDPFEITSGVPQGSHLGPLLFILFVNDLCSELKSSKVMYADDLKIFRVINSPVDCCALQMDIDKILDWCSRNGMDVNIAKCNVITFTRKRSPTVFEYSMHGATIERVRLVKDLGISLDCKLRFVEQISSVIAKAYAVLGIIRRNTKDFRDVYCLKALYIYHLFAAFWNMEL

SEQ ID NO: 2794 - protein, 873 aa, synthetic construct
  source 1..873: note = Description of Artificial Sequence: Synthetic polypeptide
HGGLAVFVRNELQMDVCRNIVIEGFHHIHCRFKFEANAINLHAVYRPPSFDVRRFLHEIEGMISLSKNNEKCVLVGDLNIPLNITTNNIVGEYIRLLETYNMLPTNTVVSRQSSNNILDHVVCSTSMIEDVFNETIFTDVSDHCLICSSINMKCHTSESTLHKRIIDHSRLNELFERSILNIPQNLSVNERLNYVITHYNEILNDCSRLVTQRVKLKGSCPWMTLDLWKLIKIKDKLLKKKRNNPNDNHTTELFAHVSKILQDKKAKTKRDYYEGLLSGNNQKAAWKIIKNVMGNQKSNSKPTAIRNGAQLITDPQQVCSSFNDHFCAVGPKLSSTINTNRNINRFGTLGSLQSTIFLKPSTRNEIILLINRLDSKKSAGPDGIPVSFIKHHHSFFASLLMETFNEIIVSGEFPDCLKIARVIPVFKSGDPKDMNNYRPISTLSIIDKLLEKLLVSRILEFSTKHHLIYGQQYGFRQGSSTLTACHELVDEIYDALDNKQIVGALFIDLKKAFDTVDHDLLLRKLESYGIRGIAKDLLKSYLTDRHQYVSIGEHKSQLRLVTTGVPQGSNLGPILFLLFVNDVARLNLHGKLRLFADDTAVFYRGTNCDTILNQIKMDLEVLLEYFGENVLSLNLNKTKYMLIHTPRRKIPAHGPISIGGHNLDKVYEHEFLGLTIDSVMSWAAHINKLKSKVSSLCGILRKISSFMPQTCLKQIYFALVHSRLQYVTAVWGSASKSHLRELQVLQNRCLKIVLRKPLLYPTVNLYSNRNDSLLPIKALYEYQVLVQMQKIVKGTSTHHNTVLHMSQQSRSSRQANHIFLFRPNSEFGKKKITYFGSKLYNALPENCKSFQNMFHFKRFVRNALKQKVEQFVL

SEQ ID NO: 2795 - protein, 766 aa, synthetic construct
  source 1..766: note = Description of Artificial Sequence: Synthetic polypeptide
VNDVVNENGRCLDLCFVSTQDVAPSIAIAPSALVKNVSHHPPLVLLLADSEPCEPLTISPVSYDFNRANQQGIVEFLASVNWLEVLDTNDVENAALTFTHILGHVIERHVPKKVHGTAGPPWQTQELRRLKTSKRAALRLYSKRGTQSHRNHYVSVNNKYKSTSRRCFRRYQQHIQQNLKTKPKSFWRYVNQQRKESGLPSTVKLDDEVASDRNQACRLFAKKFSSVFCDEMLSEEYVALAASNVPLVMETLNAFSVDDGMIARAATQLKSSINPGPDGIPSSFVKSYIEQLLLPIRHVFALSLTSGTFPSVWKNAIIFPVHKKGDRKDVSNYRGISSLCAISKLFELVVMEPLIAHCKQFISNEQHGFIPGRSTTTNLLSLTSHVSDSFTERVQTDVIYTDLTAAFDKINHLITIAKLERLGISGLMLRWFKSYLTERQLTVGLEGHFSETFTATSGIPQGSHLGPVIFLLYFNDVNYVIKGPRLSYADDLKMYLRVRSICDAITLQNDLDAFAGWCSLNRMVVNPEKCNVISFSRRKEPVYFNYQLFGKILQRVDHVKDLGVILDAQLTFKHHMSYVIAKASRTLGFIFRIAKEFTDVYCLKSLYCSLVRATLEYCSTVWHPHYQNGVQRIESVQRRFIRFALRRLPWRDPHRLPSYHSRCQLIHLETLQSRRDINRAMIVADLLQGRIDCPAILGQVDISARHRNLRANSMLRPPLRRTNFGQNVAINGLQRVFNRVAPAFDFHLPRHTVRRNFAEILTRRIV

SEQ ID NO: 2796 - protein, 913 aa, synthetic construct
  source 1..913: note = Description of Artificial Sequence: Synthetic polypeptide
NICHINVQSLIARNFTKFHELKLTFIDSKVDIICFTETWLNHTISNTMIGIEGYKLIRNDRNRHGGGICIYLRNSLLYKVVSMSQSSSNDFYGTEYLNIEIKVGFDKVLLGVIYNPPNIDCIDVLHDILENCTINYDCSFFVGDFNTDILKFSSRSRRFGEMLDAMSYECMNSEPTYFHQSGCSLLDLFITDSPDFVAKLDQISMPGVSNHDLVFCSLRLSLNRVEDIVQYRDYVNFDSSALLDGFYNIEWNNLFCMEDPNEILNFINYHILKLHDDFIPLRRKKKNRTPWFNSDISHAFINRNLAYDQWKRSRTEIDRNTYKRLRNFANDLVRQAKINHDKQNFNVDLPSKQLWKNIKKLGISNDSSFLDQDCLNANQINDYFISNYINDSSSVPIPFSSDGFKFNVFHEEDIVNSIFSIKSNAVGLDNIPIRFIKILLPIALPVYKFLFDSIIKTSVFPRAWKNSKVIPIKKKGNSASLSNLRPISILSSLSKVFEKLLKIQITKFITDNDLLHPLQSGFRQNHSTNSALIKVHDDIARVIDRRGIAVLLLIDFAKAFDRVSHSKLVKKLSSKFSFSHNAVKLIESYLNERKQAVFYNGVLSDFSFIESGVPQGSVLGPLLFSLFLNDLPASLEFCSIHMFADDVQVYLCASDDVDMNDFARKINHDLNNILRWSQNNLLAVNPSKTKAMLICKLKNRPLPPSIYFDGKRVQFYDKLENLGVIFTSNLCWDAFINGQCGKIYGTLKKLNLTTKHLDTAMKIKLFKSLILPHFIYCDFLFSNATASALNRLRVALNACVRYVFNLTRYSHVSHLQDVLLGCQFSKFYSFRACLQVYIIIKRKTPRYLYDKLQFMRNTRTMSLVIPNHSSAYYGQSLFVRGINNWNRLSPTLKSTANIYGFKGGLLRELERLQ

SEQ ID NO: 2797 - protein, 945 aa, synthetic construct
  source 1..945: note = Description of Artificial Sequence: Synthetic polypeptide
LRTKIDALYCNAIDCNYDVIILIETGLDAAINSVQLFGDNFNVFRCDRNAKNSTKSSFGGVLIAVHRRFTSSSISITTGESLEQVCVSVLVGNQRILLCAIYIPPDKSKDVNVMDEHIESVRELRNLSSGNDYLLVFGDYNQPELCWKRCGDEIRPTNSGSISAASSSLIDGMDFCNLHQMNIERNHLNRTLDLVFTSLELSPEITCSVAPLLPTDQHHPPLELDLMLPNGVNNVPTVSNATGELDFTKIDFEALSLFLSETVWHVLLDGLTADNMAETFCSVIANWLNTNVPTRRPAVSPVWGTPLLRNLKRRRNALQRRLRRHRSLENIRSFHRACDEYRELNSSLYKSYVLRVQSNLQRNPKQFWNYVNSKRKSSTIPMSVFLNDSVSSSPLEKCELFAAHFSSVFDAKPASPSEVDSAVSDVPRDLLDLDIFQITPAMVSQAAKKLKCTFSPGPDGIPSAVYCRCMSALAEPLCRIFNQSFVDSTFPAIWKQSFLVPVHKKGEKRNVINYRGITSLSAASKLFEMIVSDVILAQAKGYISIDQHGFMPGRSVTTNLLDFSTTCFEQLENGAQVDVIYTDLKAAFDTINHDILLAKISKLGASNRLSSWLLSYLTGRTLRVKVDSCMSSSFTSMSGVPQGSNLGPLLFLLFFNDVMLLLGHGCRLAYADDLKLYFVVRTVEDCVRLQALLDMFVDWCRRNRMTLSVPKCIVVSFYRITRPIMHNYVVNDVVLKRADSFCDLGVLLDHKLTFNLHRSNVIAKANRQLGFIAKISRDFTDPHCLKALYCSLIRPILESAAVVWTPYQLSWSLRLESVQRKFMRLALRNLPWRDPLNLPPYPDRCRLLDLDTLDRRRKTQQVAFIAKLMNGEVDCSRLLSMLNFRVAPRVLRGGALLQQRFHRTAFGSNEPFTSMIRLFSMFEDLYDFDGSSNQFVSRVRSSDLI

SEQ ID NO: 2798 - protein, 1058 aa, synthetic construct
  source 1..1058: note = Description of Artificial Sequence: Synthetic polypeptide
MTPKCNPVMSSNGQQPGRSVESLMEAPGPSDPVERNAVTVLHSRPGPAVGCGTGVFQSATSGEYSSIIDNAPSPSIVLNSRTCNARKMPISVNAKKSDDLLIYYQNAGGMNCDVDKYLLATSDDCYDIIVLTETWLDTRTISTQVFTPEYEVFRCDRNPRNSRKSTGGGVLIAVKKKLKANIIENDLWCSTEQLWVHVQFFGHSLFLCGIYIPPDRARDETLIETHLQSVTSVIEIAKPMDEIVVLGDFNLPGISWISSGNGFLHPDMNHSHVHSAASRLLDGYSTATLRQINHVTNENLRSLDLCFVSAQDVAPPISNAPSSLVKQVNHHPPLVLKLIVQHYSTSESIAQVTYDFTKADHEGILEFLAAVEWTEVLDTRDVDNAVSTLAHILGHVIERHVPKKTLASKGLPWQTRELRTMKTAKRTALRRYTKNPTPRMRDQYVRLNAAYKRTSRHCFNRYQQQVQRDLTAKPKSFWRYVNEQRKVSGLPPSLFLNGDVASEPQSVCQLFAQKFSSTFCDEVIPEVLVTQAASNVPLVNDSWATLTVDDDMISRAASQLKSTMKPGPDGIPSAFLKRHIDSLLVPIRHVFNLSLISGAFPSLWKNASVFPVHKKGERKDVNNYRGISSLCAISKLFELVVMDPLMTHCKNHLSDDQHGFISGRSTATNLIRLTSHIADSFAEGAQTDAIYTDLTAAFDKINHAIATAKLERFGISGNMLRWLHSYLIGRKLTVTIEGFQSNEFLATSGIPQGSHLGPLIFLIYFNDVHYTLKGPRLSFADDLKIYRRIHSDYDAMCLQQDLHAFASWCTLNRMTVNPGKCSVISFVRIRRPVVFRYELYNTVIQRVDSVKDLGVILDPQLTFKHHVAYVVAKASRTLGFIFRVAKDFTSVYCLKSLYCSLVRSTLEYCSVVWNPYYQNGSDRIESIQHRFIRFALRQLPWRDPLRLPSYRSRCQLIDLETLQLRRDIARAMVVADTLQGRIDCPVLLQSLDLNVRPRVLRNNTMLRLPFRRTNFGQQSAYIGIKRVFNRVASVFDFHLSRQTIRRKFKTVFLSFLDE

SEQ ID NO: 2799 - protein, 964 aa, synthetic construct
  source 1..964: note = Description of Artificial Sequence: Synthetic polypeptide
  VARIANT 168: note = Any amino acid
AAPASSNILMYYQNVGGINSSLAEYNRAVSDSCYDVYAFSETWLNANTLSNQLFDSSYIVYRQDRSASNSNKRTGGGVLFAVRSNFKSRVLNSPNGSSIEQLWVAITTVDATLYLCVIYIPPDRVNDESLIEKHTDSLDWVVSQLKPRDSIMIIGDFNLSGISWQYDXSGSLFPVASRSTISLTSRKLLDAYSTACLRQTVGIMNENSRVLDLCFVSEELRDASTVMQAPSPLVKTCRHHPPILLKMEICPQKRFHDVSESVFYDFRNADFNGMNDFFENVDWDDVLRDSDANLAASTISAILLYGIDQYVPVKVKREPSKPAWSNSELKNLKRVKKAALRRHSKFRTDSTRARYMQANTEYKQLNDCLYNAHQDHLQSILKANPRSFWKHVNEQRKESGLPPTMSDGLHEADSKEDIADMFRTQFSNVFTNEHVDPDIVNDAIRDVPRLSTFVQQIIITDDMVASASKELKSSTGSGPDGIPSLVLKRCAETIAAPLARVFNLSLASGVFPNCWKQSYVFPVFKKGSKQLVSNYRGIAALSATSKLFEVIILQKLVQSYAHYISPDQHGFMPKRSTTTNLACFTSFILRLMEAGQQVDAIYTDLSAAFDKMNHQIAVAKFDKLGMGNSMLLWLQSYLTGRNMSVKIGDHVSSPFRVWSGVPQGSHLGPFLFLLYMNDVNFKLKCLKLSYADDLKLYWTIKQPEDAVFLQHELEAFAEWCQINRMSLNVSKCSVISFSRKHAPFHFGYFLAGTQLERVSTVKDLGILLDSKMTFKDHVAYAVSKASSQLGFLFRYAKKFRDVYCLKALYCSIVRPTLEYSSIIWSPYYQNGIKRVEAIQRKFVRFALRHLRWRDPLNLPSYGSRCQLIKLESLVSRRNVAKACFVGDLLQGNIDCSTLLSCLDINVRRRNLRTHSFINIPSARTNYGLQEPMRSMSRVFNMCYHVFDFNVSRETNKSSYRRVLC

SEQ ID NO: 2800 - protein, 940 aa, synthetic construct
  source 1..940: note = Description of Artificial Sequence: Synthetic polypeptide
  VARIANT 197: note = Any amino acid
MRTKTNEFRTKMETCDYDIIVLTETWLRPDVVNAELASNYCIFRCDRNDNTSTLQRGGGVLIAVKSTLRCSAVELTDYIHLEQVVVAVRLPDTTIYVCGIYIRPNSHFDVYDSHASAVQEICNLSSTRDSIVVVGDYNLPHLTWHFDDDCNSYLPRNASSESEIMFTQSMIGSGLHQINSLRNMNGRILDLAFVSEXSFVELIDPPSSLLKVDSHHKPFVLRIEIETRTRAPVEEADVDDFDFKRCDFAALNDMLVAVDWNETFGDAPLDRITVLFYDKVFDIIRHHVPRRRRCSAVHSKLPWWTPELRHLRNIVRKARKRYFRNKSHDNRKNLKSLETRYSVCQENAFRSYTNRMESNLKRDPKSFWTYIKKLKNINRIPEELSYNGTTAETAEASANLFADFFSSVHNNHSPTFSSSARQNIQSFNVSLPMITISQHEVSSALKKLDVSKGAGTDCLPPTFLKECADSLKTPISVIFNRSLREQVFPEIWKVASITPIHKSGSVHSVENYRGISILCCIAKVFEEIIHRSLYSAVRPIISDVQHGFVKKRSTVSNLMSFTNVLSNSVEKRRQVDAIYFDFAKAFDKVPHELVISKLKHIGLPDWITEWLRSYLTDRKAHVKVGRARSHSYDISSGVPQGSVLGPLIFILFINDLAVRLKSGKLMYADDLKIYREISSTLDCCALQSDVNELISWCTENGMELNIDKCKTITFTRRQTYVTHDYAIGNNIIERVFSIRDLGVIIDSKLKFTEHISTVTAKGFAVLGFIRRNSQSFRDVYTLKALYCSLVRSVMEYAVCVWSPYHATHMLRIEKVQRCFIHYCLRQLPWNDPTNLPDYVSRCRLIDLETLTSRRTKIQRLFVYDLLSNNIDCSELTNELRFYAPTRQLRERQLLVIRPHRTTYGQNCPMSSCLRAFNDVGCYFDFNVSKCTFKHRIKYLN

SEQ ID NO: 2801 - protein, 858 aa, synthetic construct
  source 1..858: note = Description of Artificial Sequence: Synthetic polypeptide
EQSIVCVKLQKSSIYICGIYLRPNSQPVLYSSHSAAIQQLSERISRFDSIVVVGDYNLPQLIWQTDDDINGLLPSNASSEQEVTLLETMVASGFQQINNIVNSNGRLLDLAFVNDNNDVELLEPPTPLLRMDNHHKPFVLRIDVNDSCTQVGDSNHADDFDFRYCNFDELKSAIATVEWATLFIGKDTDETVCTFYEVLHRILDEHVPRKRRRRTHPFKHPWWTSELQHLRNIVRKSRRRYFQSRTVENRDKLRLLEASYIDCQTASFRRYVARMETTAKEDPSAFWTFIRNRKRVNKFPAEMAFRDTVANSPEGIANLFADFLENVHCTNPPTFSPDSLRNCPTFDLNLEPFDFAQQDVLSALQKLDTSKGPGTDNLPPLLFKECADSFQIPLTIIFNKSLQSRTFPMLWKTASVIPIFKAGSTRGVENYRGISILCCLAKIFEELVHNVLYTASQPLISQFQHGFVKKRSTTTNLMTFTSFLSTEIENKHQVDAIYFDFSKAFDKVPHDLAISKLRHLGFPNWIADWLRSYLTNRKAFVNINGTYSRVISVTSGVPQGSVLGPLIFVLFINDLCFRLKSGKLFYADDLKIYRTIASHLDCCALQADVNELELWCQENGMELNIKKCKSIAFSRRQSRTEFDYKIGSEPLERVESIRDLGVIIDTKVRFNDHISVINAKAFAALGFVRRSTNDFNDIYALKSLYCSLVRSILEYAACVWAPHHTTQIVRLEKVQRSFIRYALRQLPWSDPVNLPDYPARCMLINLEMLDARRNNLQRLFVFDLIMGNIDCPALLEDVQFYAPLRQLRERDLLQIRRHRTSYGFNNPLSRCFRLFNCASALFDFNVSKYVFKNRLKDF

SEQ ID NO: 2802 - protein, 816 aa, synthetic construct
  source 1..816: note = Description of Artificial Sequence: Synthetic polypeptide
GIYYRPPHQEEELDLEFSRELMEAACSRDMVVMGDLNYPDICWEEHLARSDRSCRFLTCVEELYLVQEVNGPTRGKALLDLVLAKGDDLVGDLRIEGNLGDSDHEMIEFTIRRRAGKSASRAEVLDFRKADFNELRKIVGETLWEEGLEGKGVQEGWSFLKGTILRAQKRSIPVCRKGGKGAGKPSWLTRGVKECLKKKKEAYGQWKQGVVTKEEYTSIARICRERIRKARAVTEIRLVTEIKDNKKSFFRYIGSRRKTKGNVGPLQNGTGQLITDSQEKAELFNEYFASVFLHANGGRPPGRILDGCGRGDCQPMVSVELVREHLERLNVFKSAGPDGLHPRVLRELAGVIAGPLAKVFEDSWCSGEVPEDWKRANVVPIFKKGRREDPGNYRPVSLTSIPGKILEKIIKKSICERLAEGMMLKDSQHGFVAGRSCLTNLVSFYDQVTNRLDVGDAVDVIYLDFKKAFDMVSHDALIKKLGDCGLAESTVRWVGNWLRGRTQRVLVDGSVSSWREVASGVPQGSVLGPVLFNIFINDLDEDVESTLAKFADDTKLWGKAVTLGDRMRIQADLDKLERWAERNRMQFNKDKCRVLHLGRSNQRHEYRLGGDVLASTMAERDLGVMVDHRMNMSRQCDAVVNRANSILGCISRCVASRAKEVILPLYSALVRPQLEYCVQFWAPHFKKDVENLERVQRRATRMIKGLEDKPYEERLRDLGLFSLGKRRLRGDLVAVYKYVRGEYRELGEKLFTRAPQGRTRSNGHKLLEDGFRLDVRKNFFTVRVTRIWNRLPKEVVQSPTLEVFKRRLDRHLAGII

SEQ ID NO: 2803 - protein, 977 aa, synthetic construct
  source 1..977: note = Description of Artificial Sequence: Synthetic polypeptide
SPPAGFKLGSSGEGEDEYGGSHGTPNQETPTRSAQVCSKDPIRQQFKGGPGTATRGIRCIYTNARSMGNKQEDLELLLASNNFDLVGLTETWWDSSHDWVVGIEGYRLYRRDRVGKKGGGVALYVKEQYTSSLIKLGSEGGQAETLWVRIQGARGERDLVVGVYYRPPHQDDELDQEFSKQLEEAVRSRDMVVMGDLNYPDICWEEQSARSNRSRRFLTCIQDLHLTQEVRCPTRGNALLDLVLATGDDLVGDLRIQGNLGDSDHQMIKFTIQRRAGIIPSRARVLNFKKADFNRLRGLVSRVLGAKNLDALRVQDGWTFLKETILWAQSESIPWQRKGGKGARKPLWLTRGIQDTLRAKKEAYRKWKQGVASKEEYTSLARTCRESVRKAKATLELRLASGIKDNKKSFFRYVGSKKRVRGSIGPIQDGQGGLVTDSRDKAELFNEFFASVFLNGNLDEPSTYITDTNKGNISRPTVSADTVKRHLEGLDVFKSPGPEGLHPWVMKELAGVIADPLARIYERSWCSGQVPEDWKRANVVPIFKKGRKEDPGNYRPVSLTSIPGKILEKIIKEHICGSPLANVMRRGNQHGFLAGRSCLTNLVSFYDKATNCLDAGVEVDVIYLDFKKAFDKVSHTILINKLRGFALDDYTVDWVANWLKGRTQRVVVDGSVSTWKDVGSGVPQGSVLGPVLFNIFISDLDEGVGSTLSKFADDTKLWGAANTLERRNQIQADLDRLGKWAESNRMQFNKDKCKVLHLGRKNCHHTYRLGGDLLSSTEAEKDLGVTVDSRMNMSRQCDEAVGRANRTLSCIRRCFTNRSREVILPLYAALVRPQLEYCVQFWMPQFKRDADNLERVQRRATRLIRGLQGRPYEERLRDLNLFSLSKRRLRGDLVAAYKFIRGEQHEVGDDLFTRAPPGMTRNNGHKLLERRFRLDIRRKFFTVRVARIWNGLPREVVLAPSLGVFKRRLDRHLAGIT

SEQ ID NO: 2804 - protein, 784 aa, synthetic construct
  source 1..784: note = Description of Artificial Sequence: Synthetic polypeptide
MGETILDFAMAYDLAIANTYFKKRDEHLITYKSGSHKSQIDLFLVKKVDRPSCKDCKVIPGESLTTQHRLVVMDVCIKTWKRRGESNGCPRTRWWNLKNEKIDLFRDKLVEEGKWNSEHDVNVIWNEMADCIKKVAKEVLGESRGKRNFDKETWWWSDEVQKAISEKRSCYKTWQCNRNDQNLEEYKNAKKNAKQIVSKAKLKAYDNLYNKLGTREGEKDVFKLAKIREKKCRDLNHIKCIKSEDQRVLVKDDEVNERWRVYFQKLLNDEHNGNIVVEGTVGTSEGGGHRYIRRIRMSEVKEALKRMKIGKALGPDGIPIEVWKCMGEIGIDWLTKLFNKVLRTKKMPDEWRKSIVVPIYKNKGDIQNCANYRGIKLMSHTMKLWERVIEQRLRHETSVSENQFGFMPGRSTTEAIFLLRQLIEKFRAKGKDLHMVFIDLEKAYDRVPRDLIWRVLEKKGVSRHYIDLVRDMYDGALTSVRTTSGETSEFSVTIGLHQGSALSPYLFVLVMDDLTRHLQDEVPWCMLFADDIVLIDETRNGVNTKLELWRDALESKGFKISRTKTEYMECKFSNNRSRDEEVVKIDGQEVQKRPHFRYLGSIIQENGEIEEDVAHRIRAGWAKWRCATGILCDRRIPMKLKGKFYRTAVRPALLYGAECWADKKQYTHRMSVAEMRMLRWMSGKTRRDRIRNESIRENLGVAPIGDKMRESRLRWAGHVWRRPSTTPVRRCELVQVEGLKRARGRPKRTWLEVVRKDMGTYGLTEGMAFNRAEWRTRIHVADPN

SEQ ID NO: 2805 - protein, 967 aa, synthetic construct
  source 1..967: note = Description of Artificial Sequence: Synthetic polypeptide
MFINPIPLCALPRPKWSIHRRRNLSNMIYPPLSTPQEFTVTGGLWNCQSAVKKADFITAFAKTKSLDFLALTETWITPDNTATPAALSAGYSFSHTPRASGRGGGTGLLISLAWKFCVLPSPNPTSSSFESHAITVTHPSKFHIIVLYRPPGPLGSFLDELDTLLSSLPEDGTPAILLGDFNLSPETSQLSRVASLLQSFGLSLSSSPPTHKAGNQLDLVFTRSCSIPQLTVTPLHVSDHFFLSFPLSYLHPLNSSNSSPTVTFRRNLSTLSQSSLISTALSTLPPPASFSNLPVDLATSTFNSCLSQSLDSLCPLVSKPARSSPPCPWLTESLRSSRTSLRAAERKWRKSRSSDDLTAYHTLLAAFTSALTSAKASFFQSKISACVSNPRKLFSTFSSLLTPPPPPPPSSLSADDFLAAFEGKVATIRNSFAHPVSPPPPRDRPTATLTSFEMLEDSDVLQLITSHRATTCPLDPIPSKVLQSISSEFLPYLSSIVNSSLSSGHVPSDFKMARVTPLLKKPTSDPSDVTNYRPVSLLPFLSKTLERAVLKQLTSFLHQNNLLDPHQSGFRSGHSTETALLGVTEALATARASRLSSVLILLDLSAAFDTVNHKILLSTLAGMGIAGTALSWFASYLADRTYQVTWKGSASASHPLVTGVPQGSVLGPLLFSLYTRSLGSVINSHGFSYHCYADDTQLFFSFPPSVTQVNDKISSCLADISTWMASHHLKLNLNKTELLFFPCKTSLLRELSITVDGTTVTASHSAKSLGVVLDDQLDLKEHIKATSRSCRFLLYNIRRIRPYLTTHSTQLLVQATVTSRLDYCNSLLASLPACAIQPLQMIQNAAARLIYNLPKFSHVTPLLRSLHWLPVAARIRFKTLTLAYTAANRTAPIYLQDMIRFYVPARPLRSAEAGRLVTPPTRPKGSQSFSTLAPQWWNELPVPLRTSPSLPIFRRGLKTHLFRLYLD

SEQ ID NO: 2806 - protein, 1148 aa, synthetic construct
  source 1..1148: note = Description of Artificial Sequence: Synthetic polypeptide
MVKQTLKKSILARSSPRIIRTTASATPGHLSTSGLQEPGPIAEQPGHGPVGQLEAKQLQKWQKFSMPQNRTVMNCYYRSEPQKRGYQKRMYQLWKLEYPDSTVTEQRLADQRRYITKKKVLSEVELEEIKSNCETEEQTTVETAAEDLMTSEPTEHMEPEENAGIFQDDEHEEPVAIAYTTPGTLTMKQQELKENFLTHAALKEGRQRLPTLKTVPRKHLAPLMNDVNAALATVEITTMEETNQLAYSTAVIVTQELGIQQLKPARKMIGKPKWKIRLELKIRSLRSDASNLKNMKEQKLKNVKTKNYLIKKYWLNTRKIEEALEIVKQQITATARKIERYEARVIQYKQNQLFQSDQRRFYQSLNQQVAVKNEKPEKTATNAFWKDLWETEKGYNKKAEWIKDFENKFSENKMRTLEITTEMITERVKKVKNWTSPGNDQLHGFWLKYLSSLHSKMAEQFNEMLQTGNISKWITTGKTYLIQKDPAKGAIPGNYRPITCLPTMFKLLTGIIADQIQDYLEENNILPVEQKGNKRRSRGTKDQLLIDKMILENCKSRKTNLYTTWIDYKKAFDSLPHCWIIKCLDVIGVCENIRKFTENAMKQWKTELFVGNESYGTVNIRRGIFQGDSLSPLLFIIAMVPLSVILQKTNLGYQTARNSPKISHLLYMDDLKLYGKSETEIQSLTNTVRIFSTDISMEFGLDKCATVALKKGKITHSEGIEMPNGQTIKCNQPEAYKYLGILQLDNIKHGHVKNVVSKEYIQRVRKVLKSKLNGGNTIKAINTWAIPVIRYTAGIVNWTQAELDDLDRKTRKLMTIHYSLHPRSDVDRLYLPRKSGGRGLLQVKQTVEEEKHALADYVKGSQEPTLREVNSSKLLQVQKTKSEYHKNTIQSRRENWRKKALHGQFLGKIESQIDKEKTWLWLTNGTLKKETEGLILAAQEQAIRTNAIKAKIEKSTTDPKCRLCKEADETIDHILSCCKKIAQTDYKQRHNTVAQMIHWNLCHKYHLPATKNWWDHKPEKVTENEHVKLLWDFRIQTDRVLEHNTPDLTIVLKDKVWIVDVAIPGDSRIEEKQLEKLTRYEDLKIELQRLWHKPVKVVPVVIGTLGAVPKDLGLHLNTIGADKITICQLQKATLLGSARIIRRYITQS

SEQ ID NO: 2807 - protein, 847 aa, synthetic construct
  source 1..847: note = Description of Artificial Sequence: Synthetic polypeptide
  VARIANT 507: note = Any amino acid
MGIECIGLTLAIRESVTILLVYRAPGAPNENIPKLLDLVADWALKFPSLIVLGDFNVHADRLLSSSIARDLVQSMETIGFSLMVTGPTHRAGHTLDLIFSIGIQVTLSSVLEIPWSDHYILNTQIKSSPPQHPETEQIFARPRKLMDPIRLSSVLKELDYTADSLHERVENWNKNLSTALDIVAPKRAFRPRRNRSPWFTDALRQMKLERKRLERKWRKKPDETSKLALETHQKIYEAATREAKKEYNSSLIASARSRPAQIFKIVRNIINPTHPAKDMASQDITAETFQSYFINKINLLREGLPPTEDTLRELEAFWPSSDKLLELFVPLEMEDLEKTLAAARPTTCSLDPCPSRLVKECWEGLRDPLRDIINSSLEQGIFPECLKEAVVHPLLKKPSLDAAIPSNYRPVSNLPFLSKVIERTVAGQLQQFLDETAGLDPFQSGFRSGHGTETVLVAITDEIRRQLDRGGSALLVLLDLTAAFDTVDHDLLIHRLAMSGVRGLALXWFNSFLRDRRQRVEWSGQSSESSCLCCGVPQGAILSPLLFNIYVRPLAGLVRSFGIECYQYADDTQLLLRLEPGTTTIPENFKLCLEAVMSWLRASRLKVNPAKTEILWPGQPPELIQSLPDFDGEVLVPSATVKSLGVVLDSSLTMEAQITAISKQAFFHLRQARKLASYLSTEALATVIHATVTTRLDYCNALYAGLPKTKTQKIRMVQNAAARLLAGSSIRSHITPILKQLHWLPIEHRISYKILILTFRARNGQGPLYLRDRLIPFFHQWSPRSSQENLLYVPGPREVHLEATRRRAFSTYAPILWNSLPPYVRAMSELRPFVKALKTWLFGCAFK

SEQ ID NO: 2808 - protein, 846 aa, synthetic construct
  source 1..846: note = Description of Artificial Sequence: Synthetic polypeptide
MPAIDVGETSGENASGTWPHSPKDIQQPCDPGHESLRQHIEHLYGEKLFQDTRRLEKLRTRKAHLLCSLTFLLRCRDTDTIPQFLAAKRTFKTPQAHRIYNRLERNLLRERIHTIRKELANTDKELLHLHINISQKMNTQDWDKIDSLTYKKMEKDMVLHTKRQKQKFDKCRKQQPKPELDKSRTIINLTDRQLTEDQVSILEKGGNFAVTTTRIPVENIIANVESAIYQLPEEEAEEVRMETARILRNAKLPPSNITRKERQAIKDLNSDPEIIILPADKGNATVIMETKQYKEKIRQLLDPTIYKKLKQDPTNKITRKTNTLIKNSSINFDIRQQLCKSEALPPRLYGLPKIHKDSIPLRPIVSAIGSPTYNLAKFLATQLQTHIGLTAHYIKDSTHFIEKISNLNLSTKDILISFDVVSLFTKVPVADTLTLIKQNFPEDITALFHHCLTTSYFQWDTGFYEQKDGVAMGSPLSPVVANFYMEYFEKQALETAPKKPTVWFRYVDDTFTIWSHGEEELSKFLDHLNSIHPNIQFTMEKEKEGKLPFLDVLVIRKPNQQLGHTVYRKPTHTDRYLHKNSNHHPSQKRSTIKALTDRAQRICEPHLLQGELNHLNWALQANGYSTTDIRRAARPRTSHESQDKDPPRGKVFLPYIKGTTDRIGKLMKKHNLQTIYRPTKKIQQMLRSAKDKRDPLSSAGVYRIPCSCGQVYIGTTKRSAQTRVKEHERHCRLIQPEKSAIAEHLMNQPGHRILFENTKMLDHSNNYHVRLHREAIEIHKHVDNFNRKEETMKMNKIWLPVLQNSKIKTVNKKQYSENRGFPDMNQPRAVNDSKQRMPQRQEEDSR

SEQ ID NO: 2809 - protein, 972 aa, synthetic construct
  source 1..972: note = Description of Artificial Sequence: Synthetic polypeptide
MTIISINIEGMSAAKEQLLYELCRDKKCDVLCVQETHRDKQQKRPKVPGMILVAERPHAQYGSAVFVKPGLQVSSVHNTEENNIEVITVELNNITITSVYKPPNEEFCFSSPENFDSHQRTVVIGDFNSHSHVWGYAQEDKNGEAVLSWAELHKLSLIHDSKLPPSYNSGRWHRGYNPDLLFVSDSIVQQCSKSVGPPIPNTQHRPIVCQLFPTIRPLEVRFKRRFNFRKADWSKFSDMLDDKIISVAPIPEEYERFIKIVKTCSRASIPRGCRTHYLQGITPDTAALLEDYYRLHNEDPFSEQTLQTAQSILSSISEAKKEQWIKLITEVDMGRSSQKAWRLLRRLSNDPSQTNTHANIKADQIAHQLLKNGKPKLSTKVGRKPIVRQPDNENNHLHEPFTSTELDMALNKCKNGKAAGLDDLRMEQIKNFGPKARCWLLKMMNNCIASCQIPKIWRKARVIAILKPGKDRNDPKSYRPISLLCHLYKVLERLILNRIMEKIDPCLIPEQAGFRKGKSCTSQVLNLTQHIEDGFERQQITGAVFIDLSAAYDTVNHRLLLRKTYNITKDYHLTRFIGNLLQNRSFFVEFQGQRSRWRKQKNGLPQGSVLAPSMFNIYTNDQPLPEGTESFIYADDRAITAQAGSFEMVEQKLSEALGALTAYYRENQLIPNPSKTQTCAFHLKNRQASRALRITWEGIPLEHCSTPKYLGVTLDRALTYKKHCFTIKQKVGARNNIVRKLTGTTWGSQPDTVKTSALALCYSAAEYACPVWNTSHHVKTVDVALNETCRIITGCLRPTPLEKLYCLAGIAPPDICREVAANNERTKALTSPAHPLFGYQPARQRLKSRNSFLRSTEILAGTPQQARVQKWQAKTRNLNQWLTPDERLPPGHTEDWATWKALNRLRSGTTRCRANLKKWGYKVESATCDCGEEQTTDHLLQCILSPATCTMEDLLTATPEALQVASYWAKDI

SEQ ID NO: 2810 - protein, 1355 aa, synthetic construct
  source 1..1355: note = Description of Artificial Sequence: Synthetic polypeptide
MEGVCCDCSVPLESLECGIMCSFCDAVYHSACTKSPFTVIEEVKRTASLHWSCVGCSNALGNPHSKAVKTTGMQVGFQAALTAAVEVMKAALVPPVMHEIREGFASFAAAHQAPSEHFNVPPPDALPSGKRRRLFRDVVASTEAIVVDNAPLYPVNTDTDNTHQRNRPSLPPIITGTDTTTTSIPTVSQLPRTNYMWLHLSRLAKTVTVDQVVSMVKSQLDTTDVIAFSLLKAGTTISSVSSLTFKVRIIAALRDKALTAGSWPVGLGVREFISLPQRPSHHRPDLTNTNTPIPVRHSPMHPVQLSPDMNCTLISPAPQKQLQPHQTPLKCTKLLFNTFFLSNNHTTVSSKGTVPLNLTSHLFTRNNNTSTTRSLTDDLAPTYTRIPLNVRSTSITVYYQNVRGLRSKADEFRLTVLEADYDVVVLTETWLDPSLPTALLFGDAHCVYRCDRNAANSSLSRGGGVLIAVSSALRSHALPVLAQTLEFACICIQLPTYRLYIAAAYLPPNHSTDEGKINALLDTVNSICDTLGPNDRFVLVGDFNQPALSWSPAQSNHETPFVFFEPHTSSVRSAQFVDGLHQNALYQLNNNTNSMGRILDLAYGNWSSAATSSLIRVSEHPLLPIDCYHPPLEFDLEITASSMNHATTVTEIKLNYARADLTKLKRLICSFNQSFECSNYTSIDHATNDFSEFMRAALRECAPIKKPHRGPPWGDRTLHALKKAKRAAYDYLRANRSTPCRLYYNGAHALYRRYNRVCYRRYIRQTERSLRKYPRRFWSFADNMRKSTGLPGTIRYKDNCAHSPLDICELFATRFEDSFISNITPPEAVASALVNTPADAIHVTLPIVTETLVTQKIERLKSSYSEGPDGIPATILKRCAVSVAPVLTKIFNESLRTGTFPSLWKVSWLTPIHKKGSKNEAVNYRGITSLAACAKVFELIIYEPLMASAGKYISTNQHGFMPKRSTTTNLMQFVSGCYKSIDDGMQVDAIYTDIKAAFDSVSHNILLAKLDRLGLSPPLVKWMKSYLCGRSYAVRMGSHQSRSIGASSGVPQGSNLGPLLFLLYISDLCTALPDNSCLLYADDAKIYREIREPEDHLQLQATLTEFVSWCKRNALSVCIDKCAIISFSRSRAPALFNYTLDGQNLERVNCVKDLGVLLDAKLSFEEQIDQVVASGNRLLGLVINMTRELRDPMCFKTLYCALIRPLLEYASIVWWPASTRALARLESIQRKATRFALRDWPRRLDYRTRCLLLGIPPLAERVEHTRLAFITGILNGTIDCPELLSRIHLYVPARILRRRPMLAVAETRTTFGSRNPLLCMCRLLNSANDIYEPGMTITELTSLLSVRNAFNNNNI

SEQ ID NO: 2811 - protein, 1064 aa, synthetic construct
  source 1..1064: note = Description of Artificial Sequence: Synthetic polypeptide
SPRIPRIFGLQCSPGFSSTTAAAIPSQAINRCDPRTRITSVYPYRFSAANFPPVDEPAATTAQSNSTSTPITPLHHAAERFETLPSVASPITVSAPLPLHASFPHPIDDLRFYYQNTRGLRTKLDDLRLASADTEYHVLILTETWLSENIPSSLAFDNNFVIYRCDRNSRNSSRSRGGGTLIAVSRKLAACEISPASDSLEQCWIRLKLPSCSLFIGSIYLPPTLSADASTLNTLDASIDEIISRMKKNDRLLLFGDFNIPSITWHASPDPAPPFLPLLVPASSAHSSSLFIDIVRYHSLSQLSSVSNFRQVQLDLIFTFPKNQSNATSTCTYVSQAPVPILQIDPHHPPLELSLKITGSLTPSNRSQHSSSRLTTAPSLDFRKTDFNLLNTSLSNIDWSQLYSCKDVNLAVSTFTSLFLSTLPQCCPKRNPPRSPPWSDATLKSLKRDKSRYQRAYWSTRSVNALRTYKYAAAAYRLYNRTRYNGYILILQTRLRWYPRAFWKFMNARRKGSSLPSTMHLESVYASSPEDICSLFRNHFSNIFSPPSQIPNTASQCLSYTPQDVIDVSCFGFDEHSVSEALSKLKPSFSAGPDGIPPSLLKKTAEVIAPLLSFIFNLSLRLCCFPSSWKSGWLCPIFKKGNSADVSNYRGIVLLPACSKVFEIAVHSVISFQVKSWISVNQHGFMPSRSTVTNLMQFASHVIPSLDSGLQVDTIYTDFKAAFDTVPHHLLLLKLKKLGFSNMLIDWLYSFLNSRSIRVKTDTTFSSSFCPSSGVPQGSVLSPLLFVLFVSDVHAILPSEGHLLYADDLKIYLTISTHSDCLRLQEFLNSFSLWCSYNQLSLCPEKCSVISFCHNRNPIHYEYSLSNSVLSRTSLIRDLGVLWDDKLSLNEHLESVVASASRTLGLICRLTRDFRDPLCLKSLYCSLVRSTLEYASVVVGPVRSGWILRFEKVQKRFTRFAFRRMAGPNAAMPSYESRCNLLGLESLEVRRSQARVLFIGRMLNGLIDAPTLLEKIGLYAPSRNLRARSALNMVSRQTTFGSNEPLLLCVRTFNTSTDPPHPRL

SEQ ID NO: 2812 - protein, 536 aa, synthetic construct
  source 1..536: note = Description of Artificial Sequence: Synthetic polypeptide
MPSPIVDQTVISRATSYTPLNMIDYTIPTFDIRTVEKCLKSLKPSTAPGPDGIPSYIISKCYQSLAPVLTNIYNTSLSSGIFPRLWKTSWMVPIFKKGDRSCASNYRGITSLCAVSKAFELLLYGPMLSATSNYIMDNQHGFVPKRSTLTNLTEFVSFCKRNLDSGGQVDAIYTDLKAAFDLISHDILIAKLQKLGFSEQIVKWLHSYLTERSYKIKVNDHTSREVLGTSGVPQGSNLGPLLFILYINDVGQLLAEHRFLLFADDVKLFAPINDTNDCINLQHAINLFSIWCRDNAMVLCIEKCRVLSFYRSRSCTRFNYQIDNISVERTDTFRDLGIILDTRLTFNDHLENIVSRGNQLLGWIIRSTQGFRNPMTIKTIYCAYVRSVLEYGSIVSDPCTEQWSNRIEAIQRKATRYAVRLLPWRQGDVLPSYHSRCLLLGIQSLKKRREIAKCLFISGLLNHHIDAPTLLATIEFNAPSRNLRTRQFISVPRYRTRFGQSDPMSAMCRTFINNFDLFDFNIPQNVFRDRLRTQLT

SEQ ID NO: 2813 - protein, 1008 aa, synthetic construct
  source 1..1008: note = Description of Artificial Sequence: Synthetic polypeptide
MMQGGESRKEAAGQKPPPSSKSKSLRIGSWNVRTLYEAGKTAQVLQEMHRYQLHILGISETHLNQSGQKRMKEGELFVYSGNDSDGPHREGVGMIISKTAQKTFRGWEAHGPRIIMASFGTKKELKVRDGRKKVINMNIIQVYAPTNDAEVENKDDFYNRLQNVIDKLPGKDINIVMGDLNAKVGSDNSHNEEIMGRHGLGEANDNGERFQNFCTFNNLVIGGTIFPHKRIHKATWVSPDGTTENQIDHFCISRKFRRSLEDVRVLRGADVASDHHLILGKMKLKLRRYAQVAAGNRLKYEVSLLKDPVKKNEFKLELKNRFQALQDLDECEVNEHWDKLREAVNATCQSTLGPKDNTRNEWISQDSLDKVKRRRELKAQVNNSRTRTEKLAAQQEYTEVNREVKNSIKKDKNTYLNGLAEKAEKAATDGHLRIVHQTTRTLSGRFSKPTLPVKDKEGKTIFNPEGQLNRWREHFDQLLNRPPPENQPEILPARNDLPIDTEPPSREEIAAAIKTLKSHKAAGPDHIPPEALKAEKDTFVEILYALFEKVWQKEEIPSDWKEGHLIKLPKKGDLSNCNNYRGITLLSIPGKVFNRILLERIKLATDEKLRGNQAGFRKNRSCVDQIATLRIIVEQSLEWNSPLVVNFIDYEKAFDSVDRETLWKLMRHFGIPEKIVKLVKATYDGTSCQVFHEGQLSEPFRVQTGVRQGCLLSPFLFILAIDWVMKEATRGKRNGIQWIPWQQLDDLDFADDLALLSHTHAQMQEKTKELNSLSRSVGLRIHPGKSKVVKLGKVSNLAVTVEDTPLEEVDSFTYLGSVIDGKGGTEADVKARTAKARSAFKQLSKVWKASNISLRTKIRLFNSNVKSVLLYGCETWKTTKTVLNKVQTFINRCMRSILRIKWQDRIRNEELWERTGQKDIEVEIGLRKWRWMGHTLRKPSGNITRQSLQWNPQGARGRGRPRETWRRCVERDMREMKLTWNELGRMAQDRDKWKELVCGLYPARGERH

SEQ ID NO: 2814 - protein, 935 aa, synthetic construct
  source 1..935: note = Description of Artificial Sequence: Synthetic polypeptide
MSLKSMVEIYQPDIIAVTEVKPKYVRFKIQESELSLDGYDYELFHNLEEEGRGLVLYVRKALKPGLCDDLDNDFCEKRFVKCVLKDGVSLLIGLAIYRSQHSPTAEEDARKLNKLFELVSLRKETHKIIMGDFNFRQIDWETETSNAGEKHIATKFLKATKDAFFIQHQKTPTRYRKGETPNILDLVFTNTEQLVTDIKVEAGIGKSDHLCLLMTLSLSAGTAPKVTRRNFRKTDVEKLREDLGAYDWESELANKNVEDTWSVIKSKIEGAIGASTPLMNISGRKNKRYMDKDTLEAVRKKHRAYRKWHRTGKTTDEIAYNKANNKARKACRKANRNYEKKLAIEAKKNPKVFYSYANSKIKSKTGIADLNKDDGTKTKSDTEKAELLNKFFQSIFTNEDTGPLPDFEEYDYNTELQDFNIETVTVKELLVSLDVNKATGPDGIPPRVLSQAADILALPLRILFRRTLNDGVLPVEWKTAFVSPIFKKGNKAAVNNYRPVSLTCVICKVMEKLVRGHIMDHIVNNMLISKDQHGFVTGRSCITQLLEALDDWTSVMDEGGSVDVIYMDYQKAFDSVPHRRLIQKLSACGVKGRVLKWVRDFLTSRKQRVVINGSRSEEAEVTSGIPQGSVLGPLLFVIYINDLPRGLKTTAKMFADDTKLYVRSDTVNGPQDLQDDLDTLQEWSQRWLLRFHPQKCCVLKVGKDNDNEYFMDQAVDGSTSRHKLNVTKREKDLGVVVDNKLTFKEHVAQMTSKANRIVGLIRRSFDYLSEDMFVLLYKSLVRPLLEYAHCVWQPFEKGLCSEIEQVQRRATKMLSHLKEKPYSERLKKLKLPSLEHRRLRGDMIETYKYIKGYYITERPAFTKATTTQLRGNSEKLQKQRSRLCVRANFLENRVNTIWNNLPESVVSAPNVDTFKRRLDEYWKDLPTIYNPTCQN

SEQ ID NO: 2815 - protein, 1202 aa, synthetic construct
  source 1..1202: note = Description of Artificial Sequence: Synthetic polypeptide
  VARIANT 96: note = Any amino acid
MSIRIASLNCRGLNKKLKRRAIFRKCTQYDIICLQETYVTNTTAREWSLEWSGDFFYSEGTNKSKGQIILVNKHFKYKTVELCIKTERILGLSFSXDDVSYVAINVYGPVVKNDKLDFIDKLYSVLKDEKADHTIICGDFNVVHNNTLDIVTGEKHDDMSTQKFRDWIANCQIVDTWRGVHGEEKDFTWSRPTPFTARRLDYIFCNTELFPFVIDSKHAFVYGTDHKAVITTVRTEKFKRGPSYWKFNNSLLKDKEYVNSMEKCIDEYLERTLDETDKTIRWELLKVMIKSHTIDYCIRKCRALKLRENLITEELLKLNDQVVKNPQDLTLLKQFESKKKELEIYQLHKARGAQIRSRQKWIEEGEKNTKYFLRMEQMRGGSNVITSLQDDKNNNLYGHVDIVDSIKNHFERLYKKDHNIETNRVDDFMQGCSFPVLDDVDKEICDSELSIVELDAIVNKLNIDSAPGIDGITTPFYKFFWSKLRKPLFTNFQQCLETGELSPTQRRGVISLLHKGKNLRRDNIKNWRPITLTNTDYKIFSKILAIRLQRVMPVLINENQTGFLKGRSISEHIRTLDDIIYVASEKNLPGMVVSLDFQRAFDTVEKGTILATLKKFNFGEGFINMVGVLMANTECCVQNGGWLSEWLNTERGIKQGCCTSPLLFVLVAELMSIKLRNNSSISGMSTILSGEIINFCKVLQYADDTTLILKDQEDLASALLDIDSFGSISGLKLNKDKSQGMWIGSDRTRTEKLGGISWVPNGNTIKILGIHFSATEEASRIELNWIDKIENMKNIMKMWMKRNPSLYGKVIICKTFLLSQISYIIQSLSLPERVLNTIDTLFFKFLWQKRHSNKKAREKVKRTVMCRSIEEGGLGVISVKDQQKVFLLNWLKRMATVTEGRPNNIPNRISDLAFTEVGGCDYFFSATANCKKTGKLCHASKFWESVMDTWIEMASIKKEPSSTIEILMEPLFNNRNIKYKGKSLYLKRWMNSGIKYVYHLYDRRILKSKEELSHITGTYAAFDFDYYALMNALPTQWKQDVSDNNTEELLVNTREVINTNGKKTVLEILSKSNREIRQLLKYRRHAEICGRNFWMRKMNIDITCKYNIAHRSTKESRLRLLHFKILHNIFPSNILLNRLGIKNTELCEHCGVKDVIEHMFIHCTLLKNFWKYVFHTICLKTSSRFPMTDCNILFGFSERGQG

SEQ ID NO: 2816 - protein, 1095 aa, synthetic construct
  source 1..1095: note = Description of Artificial Sequence: Synthetic polypeptide
MDNDLSVKRTMQKENQENSFMCEQCYRKFDTWRGLRVHQGKVCLKKRRQCRSSDCKTRSKSSQDENHSGAISASVDSPFTLSQQEMEQQTEPGLRKPRILWPAANEKAKYKTLEEEVQKKLKEVKKSSNRGDAKEILSAFATIIYDSAIKEFGICEGKKKTEKKSGLSRRQRVLAQLRKQKRDLQKQKKYAPPEEIEGLRILFEDLKKKSRDLQRHERRCTRRKERKREREQFLKNPYEAAKKLFTEARSGKLECTKEELDAYVKQTYSDSRREEPLPYMRGLKRPAAPVVKYYLGPIREKEVDEFVKKARAKSAPGGDGVSYKVFKYCDTLRHTLFEMLRGLWKDKEIVKDWCRAEGVYLPKEQNAKEIGQFRPISIINVTCKIFMGILAKRTVAYLQSNGYVDETVQKAGVPGIPGCIEHAFTIWDTIQEAKKNKESLNVVWLDLANAYGSVPHKLLMKAMDFFYVPQEVQNIMREYYSNFQMRFSTANFTTEWHRLEIGIAAGCSISVIWFILVMEMLLRSAECCEEEAKVRSPKKAFMDDVTLLTRDGDTMQSVLNRLDKLITWARMKFKAKKSRSLTINKGKQKQLKFTIAGEQMPTVKEQPVKSLGRWYSGTLSDRSQGVEIMKQAENGLKAIDQTKLPGKHKIWCLQFALYPRLAWPLTMYEVALSRVEMIERKCNSYIRKWLGLPRTINTSSLYRHRGALQLPLTSIVEIYKAGKIRTVLMLRESRDKEISGKPPDVKTARKWKAEVAANEIISALEHGDIVGPAQPDRLGLGNGDFRPFRKMSQRDRRKAATRHMQKMEAERREIHLIQCSQQGQMTRWEEHVVERKVGWSDIWKWNTSRLSFLLRSTYDVLPSPVNLVRWKVREDNKCRCGKLGTMKHILSNCNLALNRYTWRHNEVLKVLTKMATQQVEEGKYAPKIQKHGPTKIAFVPQGSKVAKRKKANEAMKDQSGGTWEVAADLKGFERFFPIPTTKKPDIVLWEEKDKEVHLVELTVPHEDNIYAAHERKENRYEALVEQCEEAGWKATHFPVEVGCRGFVATSARKWMRVAGLTAKKSNELTNSLQETAEKASHWIWLKREDSSWNES

SEQ ID NO: 2817 - protein, 1101 aa, synthetic construct
  source 1..1101: note = Description of Artificial Sequence: Synthetic polypeptide
  VARIANT 216: note = Any amino acid
MLFTNDRIPYELRRRLGNQGLPQVLVGNQAGLVDGYWKKKKIRKQRKWKNKKKTPPTTGNGKEKLIDFNILQANVCGLDKKKTQLGKILYERKVHIALLQETLHSSCDINITGYTPYPCKCEGCQGIITYIRNDIQGEVELLNWHPTDAHKVTLWYGNSKLILYNIYCPPSSTLNFLEQSTIFKKTVIAGDLNGHSPLWGYADQNNTGKRIEELCXSSNLILLQDEDSTKTLLHRRHGTLHRPDLTLVSADLHNYCSEEVLDCISSDHRPVLTKISILKHRQRKRRTRWNFKKANWDLFRKTAEDTVKLDDLDNKSIDALNSELTSTILDAAKKSIPQGCRTNYKPFWNERLEKATKTKNDARHEYEKDLKNMDKKIRYKKAVAEAKLVTKESKKEAWTQKCEGLNLHQGGREAWSLLNNLTGEKRKENPKPLHTETEVLTSELKKAEHFNKHFASINKSSKRNDLDRGLLSVLKGKERDLMTPSIFQDFLTKRELDCAIKKLKKRKSPGPDKVHNEMLQNLGEKAKLLLLKLYNRTWTEGNLPKAWKLATINPILKKGKKANDPKNYRPISLTSCIGKLCERILNSRLYWWLESSGLISQCQAGFRSKGRTEDQLFRLTQKIIDGFQRGEQTTAVFVDLQQAYDRVWRKGLLLKLQNMGIKGNMYSWIKSFLTDRLIQTQMDETLSSKAVLEEGLPQGSSISCTLFLVFLNDVSDVLKTEKALFADDLVLWHTGNSTTISRRRLQDDLNSLGTYCRLWKMKVNCEKTVYSVFTRSYNLANAEIPLKIDGTNLKKENNPVYLGVQLDSKLNLKQHTNNLRKKAMKRLNLIKRLASTNWGSDKNTLRGLYLGYTRAVFDYNLVLQNICSKTTKNSMDTIQNQALRLISGGMRSSPTAACEIHTNIEPLETRRKRAALEVYERSKRLENNHPNRVLVDKWKPNQRLKNTKSVLDTVLNLQEKHHLPERREPLERVPSTLPPHLTIAKPEIRKTLLDKSNKNTYPVALKHSALETIDSYPPTWIHSYTDGSAFKATINAGYGSVINLPSGIKKKKSLTPAGPSAPISLPNNRLSPTQQTTSTTCLTLTHLLPQTSLSLQTAFQH

SEQ ID NO: 2818 - protein, 990 aa, synthetic construct
  source 1..990: note = Description of Artificial Sequence: Synthetic polypeptide
  VARIANT 11: note = Any amino acid
  VARIANT 59: note = Any amino acid
  VARIANT 209: note = Any amino acid
  VARIANT 387: note = Any amino acid
  VARIANT 778: note = Any amino acid
  VARIANT 971: note = Any amino acid
  VARIANT 975: note = Any amino acid
MDHITSINKDXDVKGSSERTASSGRVSHAQQVTPDRHQDTAHKRKNQTRNIATWNVRTXLEKGKLDNIKKEMKRMNVNIMGLCEVRWTGAGRILSDSYNIIYSGGDKHERGVAVIMDMPTSKTLKGYLTISDRVMLVRLKGSPFDTTIIQAYAPTSESTEEEIEKFYDEINQAKTHCKSQDIVIVMGDFNAKVGATRHEDIVGPYGLGXRNERGEKLIEWAILNDMIIGNTWYEQPPRRLWTWKSPGDSARNQIDYIMIKKRYKNGMLNVKTRPGADCYSDHVPVVGKFRIRLKKTHMSKNKNMKLNMALLQSNKEMQDKFRITVQNKFGPLEEIQDIEKQWEQLKTSINEAAKDVIPERTTKAKKKWMTEEILNLMEERRTNKNNXEKYVNLHKEIRHKCNLAKETWLKEECEEMENHSNANSKDLHRKIKEVCHTRTRGSTGCLKSKDGNIIMDKDKILERWTEYIGDLYNDKRDEQRRVENNNEGPPIMKEEVIKALRKMKNGKAAGPDNITTEMIKALEDFGITTLTKLLNNIYATGHIPSDLSKSIFIALPKKPNANECETHRTISLMSHITKILLRIIMMRIRNKILPEIAQEQCGFIEGKGTVNAIYVIRTTIERALEVQKDLHLCFIDYTKAFDKVRHDKIIDMLEVLNIDGKDLRIIKNMYWDQTAAMRIENDISEYIQIKRGVRQGCVLSPDLFSLYSENIMRHIEEMPGISIGGHNINNLRYADDTVLIAEDEEHLQNLLNVIVQESDNMGLSLNIKKTETMVISRXTPIPTCNIKINDTTLKQVQHFKYLGTIISSDGRCHTEIKSRICQAKATFHKMKQILTNINLSLETRKRVLKSYIEPILLYGCEAWTINKQLERTIVATELWFIRRMLRIPWTARKTNEEVLVEANYRKQLITNIRKRQANFFGHTMRKEALENIVTTGKFDGKRGRGRQREKILDKMTTWLGAARTTDTIAAXKDRXKWRSMIAHASRQGTG

SEQ ID NO: 2819 - protein, 1308 aa, synthetic construct
  source 1..1308: note = Description of Artificial Sequence: Synthetic polypeptide
  VARIANT 9: note = Any amino acid
  VARIANT 150: note = Any amino acid
  VARIANT 170: note = Any amino acid
  VARIANT 204: note = Any amino acid
  VARIANT 727: note = Any amino acid
MHTSLHNPXTNKMPLRQMKLYELGCRLGYQGPRSLPSPGGGSDKSATGTHTAGIGATSNTQTLNILQLNISSIQNKKMELAKTLSDLRIHVALLQETQLPKRIELHLTGYTMYHCKCTKCQGIATLIRNDITAEVSHPETDDETDMQEVXVQQSDGTTYTIYNVYCPPRXTLQLNFPNTDHKHTILAGDFNGHSPLWGYSDTDXTGTVLEELLRSSNLISLQNDKTPPTLLHRASGTLSRPDLTLVSADLHPHCSMTVLDDIGSDHRPILLQISSNRKREPTNPIRRSWNYKKANWELYQQKSESRLLDVCTTNPIDECYKDITTALKTSAKEAIPRGNPKKFRPYWDKELEQLTKARKKARRRAEKNPTAENRKHYNYLTAKVKLKTKSAKRQTWREHCGELDLRKDGRKAWNLLTNLSGTKRRKNPAPMKPTEKGETCRAEVMNKYFASINKKGNQNKLSHAIKQLTKRAERTPKANLEVFEKEFTLTELKAALKKCKKRKAPGPDHVTNEMILNLTDSSLSILLGFFNRTWNEGQLPTEWKKANITPILKKDKPASQPSSYRPISLTSCLGKVVERMVNDRLYWWMESTGTISTSQAGFRKGKRTMDHLIRFAQKTSDAFQDKDNVVAVFIDLRQAYDRVWRQGLFYKMQKLGIAGRMYSWIKNFLSCRTIQTSCDSKISSQRTLEEGLPQGSALSCTLFLLFMNDLPDVISCQKALYADDLLXWSKGSDMRALNQAINADLTTISSYCQLWKMEINTDKTVFGLFSLKNKVTASQVNLKINGTTIRHEDYPKYLGVQLDRKLSLKEHLGELTKKATSRLNLLKHLSSLNWGADKATLRQLYIGYVRSVIDYSLPLQSIASQSSLAQLDRVQNQALRFVSGAMKTTPTSACEIHTNIEPLDLRRKSATLETYERFVRLEDTNENRKMADEWEPRTRIQKTSFMREATKLLEEFDPPENREPITNISSEPPYWQTPEITIRTRLLDPSCDKTTPEEILRTSALETVDSYAETPIHAYTDGSATNATRNAGYGSTIKYRNNLGEKKQTQLFGPCGTYSSNYDAERIAIVKTLEQIAQDFFEGAVTPGDVVVFSDSMSVLQAVEGGGDYRGDGNILSLVKQMGTSYGVRVTLQWVPGHSGVPGNETADHLSKTGASLPQTDTTASLQTCRGIIQAKSRDEWLNRWANAETGRSLFGYMDKPNPKDPSNLLCRADQTLIFRARTGHLHTNKHINRINPMWEPHCRHCDYHEETVEHLLLHCPNLAVLRRRLLHTPTDLQSLLYSGVDQMTRTCGYLREALRCQERNARS

SEQ ID NO: 2820 - protein, 994 aa, synthetic construct
  source 1..994: note = Description of Artificial Sequence: Synthetic polypeptide
MKDSGQSRKDSSDPKPSLSNKSLRIASWNVRTLYEAGKSSQVVQEMKRYRLHILGVSETHWIQSGQKQLSSGEQVLYSGREDKYHAEGVGIILSKYAQKSLRGWEPHGERIIMASFTTRSKSINMNIVQIYAPTNDASDEDKDAFYSQLQGVIDKLPRKDVNIIMGDANAKIGQDNVGYERIMGQHGLGQMNENGERFANICAFNSFVIGGSVFPHKRIHKATWVSPDGVTENQIDHFCISRKFRRSLEDVKVQRGADVGSDHHLLLAKLKLRLKKHGTSTGIKRTKFQVSLLDGHKKEEFQLQLRNRFQPLADLGGEDTEVDTHWTKVKEVFTSTCQEVLGGKKWEHKEWISQHSLDLIRIRRQLKAEANASRTRGSRADALEQYRTTAKDVKKSIRKDKEEFMNRLAEKAEEAAVGGHMRILYQTTRTLAGKYGKPEVPVKDQEGKSIFGKEAQSKRWVEHFNSLLNRPPPSNPPNILPARNELPICCDAPSKQEILDAIKKLNKGKAAGPDQIPPEALKADANVTADILLPLFTRIWNESKFPKDWKEGHLVKLPKKGDLSNCSNYRGITLLSIPGKVFNRIVLERIKTGTDPRLRDEQAGFRKNRSTTDQIATLRIIVEQSLEWNSQLIVNFLDYEKAFDSIDRATLWKIMRHHGIPQKLVNLIKSMYEGTSCRVVHDGQLTDSFDIKTGVRQGCLLSPFLFILAIDWLMKETTRGHRNGIQWTPWTQLDDLDFADDLALLSHTQEQMQAKTSVLNSLSESVGLRIHPGKSKVLRTDAQRKEQVTIEGKALENVESFCYLGSIIDREGGTGAEIKSRIGKAQAAFISLDRIWKTREISLRTKLRIFNSNVKSVLLYGCEAWNASQTCIKRIQVFLNRCLRKLLRIRWTDRVTNVEVLRKTRQIPVRDEVGRRRWRWIGHTLRKSGSCITKKVLDWNPQGKRSRGRPRGTWRRITEIDVQKSGKTWNNIKRLAQDREKWGVFVRGLYPGAG

SEQ ID NO: 2821 - protein, 1114 aa, synthetic construct
  source 1..1114: note = Description of Artificial Sequence: Synthetic polypeptide
  VARIANT 1041: note = Any amino acid
  VARIANT 1047: note = Any amino acid
MSPRVTFDDGSDYSVALISYRPSQTGQPPVSKVLIRHVCLLLWVYGARTKTERQTLNPAPGKKRVKLTPWKLGTWNVRTMTTGLDTTNLEKTEDIRKTAIIDRELTRLNVDITALQETRLANSGTIRERNYTFFWKGLGEDERRIHGVGFAVHNRLLNRISTPQGISERITVMEMETKTGKAHFISAYAPTLTTENEKKDQFYEELQDAINNVPKADQLFLMGDFNARVGTENKVWPTCLGPFGLGKINENGQRLLEFCTNNNLCITNTFYSGKDRHKVSWCHPRSGHWHQIDFIIVRKKDANMVKQTRSFYSADCNTDHLLVIAKAKIVTKKTPRAEKQKKPKINIRNTKDPALKAKFQEHVKEELQHLDSSSPDNMWNSMRSTIYNSASITFGIERPCKEDWVEASASTLAPLLEKKRKILIEHNTNPTESTKQQLRAAKSNLQRETRKCANQYWDKLCSEIQQASDTGNIRKMYENIRVAIGPTANKVAPLKSATGEQLTDKKKQMERWVEHYSDLYSEERHVDRQLHEAIPQLSEMSELDTTPTEEELSSAIDELACRKAAGNDNIPAEVLKENKETLLPYLYKLLTTCWLKAEIPHDMRDAKITTLYKNKGDKGDCNNYRGISLLSITGKAFARIILKRLQKLAERVLPESQCGFRSNRSTMDMIFSIRQLQEKCREQRLPLHTAFVDLTKAFDTVSRSGLYMVLGKIGCPPILLQLIISFHEDMKATIQFDEGCVLAPTLFSTYFAVLLQHAFKESPGDVFLHWRTDGSLFNLARLKAKTKINKTTVRDLLFADDAALVAHSESTLQTMMDRLSTACKVFSLVISVKKTVILTQEGAEQSHIWLNDKELETVDKFCYLGSTISSTTSLDYEINIRIGKAATTFGRLTKRAWENKRLTIKTKIKIYEACVLSTLLYGSETWTLYSRQEKRLDIFHLRCCRKILGISWRDKVTNVEVLARANLQSMTTILCLKRLRWLGHVKRMDDNRIPKQLLYGELAQGKRQRGRPKLRYKDTCKNSLSKLGVDVSIWEEIAEDXKTWRKXIKERTKMLENSLRNNQAEKRQRRKENSGNTELRSTTLTCKHCDRICASNIGRISHERSCMKTTLRPS

SEQ ID NO: 2822 - protein, 827 aa, synthetic construct
  source 1..827: note = Description of Artificial Sequence: Synthetic polypeptide
MGDFNGRVGERRTPWTKHLGPHSDHRTPCNYNGNHVLELCAEHDLFITNTFFQHRASQIYTWYRWNNIMVSSQIDFILTRTRMRITITDSRAIPNAGLDTDHRPIITTLTTKKERKPKKHKRQQERLNMHKLGDDQVQAQIRSTLNEKLGSINSTILTVEEAWDTFKTTLLDTMKEVCGTKKTRGKHRKATAWWNEEVKDAIKEKKRLYNVWVKSKNEEDYIKYRLARRHSKKVVITSKEKSWTQYGEKLSETCKTSPREFYKKVKTMRTRDEPYVPTTVINDTNGEALHEEKEIIKRWEEYFQELLNPSGVQAQNTQCPFTANYPEHSEPTILESEVREALKTSPKNKAAGDDGITTEAILACGETGIHWLTIIFQKAWKERKVPADWQNAIVVPIWKKKGSKKDCNTYRGISLLSHAGKMYAKILERRTRAKTEHLLSDAQFGFRKGRGCTDAIFALRQLCERALEYDKDLHLVFVDQEKAFDRVNRNKLWKILEQYDIKGQLLDNIRAIYANSRSAVRTTSGTSDWFPVTSGVRQGCNLSPLLFVIYMDQITKEANPDPEALNELMFADDLAMINNKTQLQEHINQLNASCEKYDMKISISKTEVMTISRRPGKVDININGSQLKQSREFKYLGSIFTENGKLDREIETRCQRANAVSYQLGPLLKHPNIPMSTKAKLINAIFLPTLTYQCQTWTLTKALERKLVTCEMKCLRRAVNKTRRDKIKNEVIRDTVGATPVLPHIEKQKVKWFGHLTRMPSNHPALRAYNIKYSGWRARGRPRRRWSESVADTLKDHGMSLLQATRLAADRHLCLPATPQGTSGRKK

SEQ ID NO: 2823 - protein, 945 aa, synthetic construct
  source 1..945: note = Description of Artificial Sequence: Synthetic polypeptide
  VARIANT 763: note = Any amino acid
MLGAHDLNLILPKGTITWKSRGSQSTLDLAFVSNALESTVMACKPAFDLEASSDHIPICTQLHIEPPNREEQQPRPQWKKADWEEVNRRLALKLSRLSTDHLELNSPESIDQRVSAITQAIKETIPTARPSTFAKPYWTKECSETVKEARKARRLWTKLGSEESWVEYQKATNRKKSQIKKAKMIGWRAIVSEATNDPAKLWKLAKWAKKSPEERSRLPQLPDIKDKDGNMFTEDTEKADILAQHFFPQPVQANLEDIDGTRYPEELTTVSSIITASEIQDTMANLASEKAAGPDGISNWMLKNCRITLGKVLEKLFNACISIGYHPKGFKESVTIVLRKPQKESYDNPKAYRPIALLNTLGKVLEKLVANRLSKAAEAHHLLPDEQMGARQLRSTISAVELITEQVHSIWGKNKRRVASLLSLDISGAFDNVSHKRLIHNMRAKGIPRWTTQYIESFLEHRTTSMNLGSFKGEQFPTSTGIPQGSSLSPILFLFFVSTLLPELQSPSSTAVGFVDDTNILTWSNSTEDNCRNLERLHGICEKWADRHGVKFAPEKYQLMHFSRARKRHNMQATVQIQGHLAKPQPSLRVLGIHLDPKLNWGAHVKSIQLKVEPQIQALGRLAQSTWGATFHKAKLVYNAVVRPAVTYGSPIWAEPGMAGKIPERVIKPLRSIQRRCLKIVTGAYNSTSSKVLEHETSTLPMEIYLKQRRVQHAGLSKSLPVQDTISSACRKIKQPRAGRQDARAVTRIMDIADWGKIGANIXTKERQKAAGKIAAFKEWERSWTRLAARQPTNHHATADPKIWNAANIFTDDKTGRTRMDQRGTPSSLHKHLSRAQSSIAMQIRSEHIGFNSYLHRRKVPGVDSPRCQCGYPSQNVKHMVMACTSWAKGRGEILRKAENRSFEAMMNNPKDLARITRWIQQEGRLEQFRLTLEVEATMRAREEG

SEQ ID NO: 2824 - protein, 337 aa, synthetic construct
  source 1..337: note = Description of Artificial Sequence: Synthetic polypeptide
  VARIANT 85: note = Ile or Leu
LLQKLINFGIPSSFVSWFAVFLADRTFSVKINDSIGDTSPTIPSGVPQGSVSGPLLFLIFINDLLLSLATIPLLHIAAFADDIKXFSNDPFVVQTGIDTVVGWAKSNSLPLAHSKTALLHLGSLNPFFPYTIAGNPIIPTSSVRDLGLLTEPNLKFSAHINRTVALALLRSKQLLKSFKSSSPQFYVYLFKCYVLPLIEYCSVVYCPPSTSKLSLKLEYPLRFFTKKVFHRCNISYTSYPDRLAHLDLFSLRHRRLKAQLQLLYNFLSGSSYFPNLDSHVRFSSSPRRPMNLVNVNPRVKDFFFITVPIWNAITCHCPTFLRPSEFNSLLQCSIQRF

SEQ ID NO: 2825 - protein, 1023 aa, synthetic construct
  source 1..1023: note = Description of Artificial Sequence: Synthetic polypeptide
IGLAGHYRVSRDTTFALNSNPSCLSPPHPASAKGKTVPGARRKRRSNLGVQTICQSDLEIKKPRDKTRRTDYRVCTFNCRSLSSDDRLAELLEETRRIQFDVIGLCETKRAAEAHLIHHDGTGVFLGKRNESSVSGGVGFIVRSTLLPKIVEVRFLSHRIGLLTFKVSRKFNCTVIQVYAPTADSDLEEICDFYDSVEDVFRECRSKYKLVIGDFNARMGCRQNNERYIGPHAMEPRNDTGELLATFCETNRLWHTNSMFKKPMHKRWTFVSPDGNHRHEIDHILANGKFVTDTTVLPSFTNGSDHRLLRCNLHFNNCLAKLEQVRRRKPPKRVLDPAIAYAISATVTVQSDPDLDTDYDNLIQSLKELQDQAIVRPANHSSNRLSEETRKLLNKRRFMDRNDPQFKSISDKCREAVQKDHEAFASTRLLSAANQKKSLKRVARDINEYKSVIPCLKSTSTGERITSRVKMEQEIEKFYTELFKSAVSNSQTSSIPATATPPPFLPEEIRHVLRSFPNGKAAGQDKISADFLKSCHDNVIDLITDRFNRYLHSRNVPKPWKTSKTTLIFKKGDRENLENYRPICLLPVLYKVFTKCLLNRMRRSLDEAQPVEQAGFRRSFSTIDHIHSLQRLLEVGREYQIPLTLVFIDFKKAFDSVEHQAIWKSLDEQGADGAYIDLLKECYKNCTTNFTPFHRPVAVPVTKGVRQGDPISPNLFSACLEHVFRKLSWIELKGEAEDYDTIPGMRVNGRNLTNLRFADDIVLIANHPNIASKMLQELVQKCSEVGLEINTGKTKVLRNRFADPSKVYFGSPSPTTQLDDVDEYIYLGRQINAQNNLMPEIHRRRRAAWAAFNGIKNTTDSITDKKIRANLFDSIVLPALTYGSEAWTFTKALSERVRITHASLERRLVGITLTQQRERDLHREDIRTMSLVRDPLNFVKKRKLGWAGHVARRKDGRWTTLMTEWRPYGWKRPVGRPPMRWTDSLRKEITTRDADGEVITPWSTIAKDRKQWLAVIRRNTTNS

SEQ ID NO: 2826 - protein, 473 aa, synthetic construct
  source 1..473: note = Description of Artificial Sequence: Synthetic polypeptide
NMKQPAKRTVMTCLDQRAAFDKVPIKKLCVDLHESLNEAKISKWLTNYLSKRIIKANFGNHSSKWCTLLGGVPQGSVLSPNLFSFYMRNMPIHPKTEITVYADDTTILAQDTNPFKAGELIQEHLDLLYDFFNERKMSISAEKSTTTLFTCDTKEFKTKIPVNWNGAEIPTTNQVRLLGVHLNTMCGSKDHVAETRKKMMVSTNILKALSGTKWGCSKELLISTAKALVKPIAIYGAPAWSQLLSETNLNKLEAAYRNTLRTCCGLTSDTPIEHIYAEAQMMPLKEEFELAKQQTYIATTKSGTHPNRNLESRRNTERRSNRPREPPLNLQEATKTHLSRLKGTKAEAQKANHTRFVREFLNSAPPNRILGATPPPLNSSEESSLPKATRTELARLRCGHSLLIPRYKARIEGTPIGTCGCGDNEGGIDHYLSCGRSHPISKEKLWTSPMEAARALGLAYKPYDPGGGATTSV

SEQ ID NO: 2827 - protein, 726 aa, synthetic construct
  source 1..726: note = Description of Artificial Sequence: Synthetic polypeptide
MPTRKSKILDVALSNSVISNLNIMAPIGSSDHNTIKFTVQLLQNISVPKKMIPDFSKLDWPCCATYFENIEWGKVFDTHSHVNDIYECFLGHIRTMFSQAVPTMPMPETSKPVPQYLRSFEQMVKNQFSKTIMSKTMNDFIEYIYLARKYRKKLRKYLSNLEVKLFKKKGNSKFSKHAKTLLKPRNCSVPALIDNDENEIVSELDKANLLASYFEAQYTNQNNTNFALDDDFVSDQPIPWVTDAEVLKVIMASKKSCSVTSDQVPFTFIKILSPLISSVLAQIFNLSMMRGQVPHAWTESIVIPLDKITNANNPTDFRPISLTSHLCRVYERCILAKIELFLIDNKFWSQNQHGFRPKKSTVTNMLESLNDWSKSIDLGEQIDIIYLDFSKAFDRLPHDLLLDKLVSLRMNKNLLIWLNEFLSNRSFRVRIGQTLSSRKLATCGVPQGAVLSPLLFGIYVNDISSILPEKVACKQFADDTKLYVSTPKTESENNLQSALDAVVDWTRGSKLTLNQSETVHVTVGKRRTDFKYHLDGYPIERKAITRDLGFLISEKLDFSEHWRKCINLAKFQLANMFNQYSTSNKKLMILLYKTFIRPRLEYGTVVSSPTKKSDEKAIESVQNAFTRRLYSRIKKRYINPTDKDYKTAMERNELFDLQTLSTRRKIIDRIQVIRMNNGKVDLKTSEFFEQQETHTRSKKKYIWSTGKSKLRRHFFVNRTLATMKQH

SEQ ID NO: 2828 - protein, 605 aa, synthetic construct
  source 1..605: note = Description of Artificial Sequence: Synthetic polypeptide
  VARIANT 7: note = Any amino acid
  VARIANT 8: note = Any amino acid
  VARIANT 9: note = Any amino acid
  VARIANT 12: note = Ile or Leu
  VARIANT 13: note = Any amino acid
  VARIANT 17: note = Any amino acid
  VARIANT 35: note = Any amino acid
  VARIANT 37: note = Any amino acid
  VARIANT 38: note = Any amino acid
  VARIANT 42: note = Any amino acid
  VARIANT 43: note = Any amino acid
  VARIANT 44: note = Any amino acid
  VARIANT 47: note = Any amino acid
  VARIANT 48: note = Any amino acid
  VARIANT 49: note = Any amino acid
  VARIANT 50: note = Any amino acid
  VARIANT 143: note = Any amino acid
STKLDLXXXEDXXFNEXHLNKSSPKAFFNFINSRXKXXQEIXXXRDXXXXQVTSDYMKAELLSNCFSNAFTEDKNTNTDFPYRTNHFINSLCFEPFIVESILSKLTPKCNTTPDGIPAIFLKRTCTSIALPLSIIFRNSYNQXVLPSFWKTALVKPLHKKGSRSDPNNYRPISLTSAVGKVMEKMVRKSIILFLDDFKLLSNSQYGFRSKMGTESQLLSYQNKLVTNYLSKQTTFSVYIDFRKAFDTVGTKKLLIKLERYGIRNHLLRWLENFLSNRTQRVIINGVMSEEKSVLSGVPQGSVLGPLLFLLFVNDIGDNFNSDYLLYADDLKIFSTDKSSIQRDLDSLSTWCENWQMSVAPNKCETIAFYHSKRGMDKDTKFTIGGATVPITSRIRDLGMFFTSDLSFSNHIDTVLRKAHQRVNIFFNVLRHAGFDTFIKCFIIYVRPLIEYGSIIFSPTLKDLVKSVESVQKSFLYRCFKKFRIEYISYFDSLSYCKLESLEHRRLIIDLTFLYKLIVSKEIFIHNFTCITRSPLPSLRRHPYIVRSTLRNSSKLSHQFFSNRIITCWNSLPSYLFPKLICSETFKSALKCLDLSKFLTLNMHNY

SEQ ID NO: 2829 - protein, 960 aa, synthetic construct
  source 1..960: note = Description of Artificial Sequence: Synthetic polypeptide
MFGRSTTDTEITEASYGPKNRRKGNDFHIGSLNVRSISDQSKAEAFDLLAVNSGCKVIALQETKRKEGEWVLSSGAELICTRREAREGGLAFWIHKDWLDSLVETKRESDRISTASFDFHGSHLHVINVYAPTSAANETQSDKFYKDLKKVYTRLSKWDSSIIICGDFNAVVGCSSDDLPFVGGHGTGQRSDNGDRLVNFAFSSRVSILNTIYPKRPNRKWTWISPNGKTKNEIDFILTNRREIAVDCEVYCDYLNCSDHRLLRARFRSTAKKEKSRKFAKTKRAGGERSWDPVRFKNTITEMLTENPPTCYEELTESIRSAASTATHATHQLSRISEATKKMMLSRFQMIHAGQTKNADLAKINNEVRRSLENDLDKWREVKSLEAAVKGRSLKKTKRALTLKSSPFTNLERPDGSTTYNRPEIRKLVLTHFSNLYAATTREPRSRYNHPDEPEILQHEVEHAIVTSKTNISPGPDQITMLQLKLGIESIAPHLTAALNQVLTNGRTPEDWKTVKISLLPKTTKPKKVKDYRPVALSSIVSKLFTKILTRRITAKSEDYLEESQAGFRRGRGCADNIQVVAQMWEKCTEFKIPLVAVFLDFTCAFDNVNWTKISEVLNNLQIGRNVIRALNNSNSSAIGELNVLNKKMRFKIKRGVRQGDSSSPLLFALALQAILDELDPAPCEDDKTGIDINGESIHRLEFADDVVLFANSVKEAEDRANRIAMGCPKYGLNINPSKTQILMNKYVTRSDIDILNTRIEISQKVKYLGRTFADDGSLTEEVARRIRAGWAAFNAIRRELLQSPQKIRIRLLTTTVIPAMTYGCETWTSKEADTKRLQRAVSNMFEIAGCDPPDMEKQVLRRKLKWAGHVSRMKYDRWAKIASEWDPRGSARPRGRPPKRWADDITDSIKIFIHNEALRGNLGHGRRRIGILEARRAWSTVGRDRVTWRSLVRSIQDGN

SEQ ID NO: 2830 - protein, 959 aa, synthetic construct
  source 1..959: note = Description of Artificial Sequence: Synthetic polypeptide
  VARIANT 38: note = Any amino acid
  VARIANT 43: note = Any amino acid
  VARIANT 57: note = Any amino acid
  VARIANT 128: note = Any amino acid
  VARIANT 150: note = Any amino acid
  VARIANT 187: note = Ile or Leu
  VARIANT 367: note = Any amino acid
  VARIANT 520: note = Any amino acid
  VARIANT 655: note = Any amino acid
MPTNHSQRTLMPRRCKYERTRQRIFSRIQKTNFAQHRXFNFFXHSPDLILSILSANXRSLMANKLEFQYIVNTTSPDILCIQETWLSSKFGNASFLDPNSNYHVFRADRCATSRGGGVCTLVKKEFPXTIITAETKNSAYELITVDIDVXVTPLRIINIYRPPSCSFENTITLLNKVSDLSNHVGQXVILGDMNINGINWNSAVPTSQTRLGSLLCDFCNQNNLTQYIRKATRKENLLDVVFSNSRLSDVRILSPIGSSDHNSINFKLDILQRPPEKKILFYDYKNIKWPKCLDYLGSIDWGRLLHPGNSISTMYQNFIDHMREAFELSVPKIYVEPTIRNTPDYLKSFYKLVQLKLERVKASRGRXDFLDYIKTAKKFRKKLLKFRRNEEVKLLESSGVSRFSKKAKYLLKPKSLRIPTLTNPLGVLSVTNAEKAEILADSFESQYVNRPLLNFELPSNFKSPQEIPWVTDAEMLSMMLKCKNSCSQTPDNVPYKFLKLIAHLISSPLAQLCNLSMMRXECPSLWKESIVIPLNKKEKPMAPTDFRPISLTSQLCRIYERCLLKKILQHLDTIKFWNNDQHGFRPKKSTVTCMLEAVNDWTESIDEGAQVDVIYLDYAKAFDRVPHDILLGKLVDANLNPNLIKWIRSYLSNRXFSVKVNNESSTPKHAQCGVPQGAVLSPILFGIFVNEIPSILPSGIRCKQFADDIKIYTAIPKSDTIEDHETLMQSAIDAVCNWSENSKLALNDSKTLVISLGKNPRTTKYQINNNPIRRETSIRDLGFIITPMLDFTGHWKKAICKAKFSVFQIFNHYCSNNPRLMTLLYKIFIRPILEYGTEISNPTRKLDCKAVESVQNAFTRRLYSRIKGRYLTPNDPDYLTAPQRNSLFNLSSLESRRQTSDRKLILKMISGLVDIDTSPFFTYEKNTRTRAKNKFKWNHCKTKIRRNFFVNRTLSSFKL

SEQ ID NO: 2831 - protein, 648 aa, synthetic construct
  source 1..648: note = Description of Artificial Sequence: Synthetic polypeptide
  VARIANT 21: note = Any amino acid
  VARIANT 117: note = Any amino acid
LINILNELLTELCPRIPERPXSKVCPLLRKLRRLRRYKSSSLSHADIANRLKRYRALASRYRKWVLKHETKLINESNCTSIRKFVSKRLKSKQSIPALLDNGKAVTSDFVKCDLFSXSFMKNFACPPEEYSTPTPSHYGSDSLSSFSSPSSSRCLFLPYIVEKVLQHLPPKCGFSPHLANYLVLKKCATPLALPLSIIFSQSYCESEVPAAWKLAVVIPVHKKGNPACTDNYRPISLTDPIARVMERVICNYIRSELAYKFSPYQHGFLHFRSCTTALASSTAKYRQILKKSKTLDIIFFDFSKAFDQVSHSILLDKLAKFGVDPLTCSWFENFLCDRSFTLKVNNTFGDKLYPVYSGVPQGSVSGPLLFIIFINDLLFSLPPPIHYSCFADDIKIFSDSPEILQSGIDTVVQWSIRNCLPLAPTKTSLLHLGDKNRMLKYFIHGIEIQHSSCVRDLGLITDSSLTFKIHISRIAALANLRANQLLKCFSSQSPQFYAHLFNTYVRPLLEYCSIVYSPSPSSSLAGKLENPLRTYSRRVLQRCNISFSSYENRLEILNLTSTRHNRLKSQLLFLYRIVTNNSHFPNLSDFVSFVKSNRRPMLLVRNDTCTLHFFARTVPIWNSLLRNCSTFLSPIEFSNLLNVNISRF

SEQ ID NO: 2832 - protein, 779 aa, synthetic construct
  source 1..779: note = Description of Artificial Sequence: Synthetic polypeptide
  VARIANT 3: note = Any amino acid
  VARIANT 33: note = Any amino acid
IFXTIILLYWAISIFPQSTGDLLPDSPEFLVDXMTSFHLSQLVTFPTRTSRLGKKNFLDLLFSSNTSIIKNLKAGSPFILSDHCSVLFSLSLATSTIPKPPTEDPQHLHFRKCDFNKLNCHLFSYNWPKQLSYFATADSKLYHFLKIFNELIEQYTPISTKRTVHSKITGKKLYRKLRKRHPNSLSLSLKKRVKSRLKNIRKSFESQEKKVIASKNPRSLYSFIKSRIKTKSTLTHFEVDKKVIQKPSDMADLLVNIFSKNFNTPPPPFPALPSPKPLNTSIDTSPFGIYQVIAKIKPKIGYSKDNINNFIIKNCADSISIPLSLIFGEFLLSRTFPDCWKISTVIPVFKKGNIHDPLNYRPIALTHPLARLFEKVVIGPIRRTFSPKLSKKQFGFLNNRSCTLAHLHASSIFHSVLSYPKSYLDVILIDFRKAFDSVPHELLLCKLSNFGFDTKLCEWFREFLTGRSSIVKIDNNYSSIKFKNSSGVLQGTVTGPFLFLVYINDLLESFPDDVHVVAFADDIKIFGNNRSSLQKSIKIIEEWCSIWQLKLAENKTQVLHLGVHNPRVEYHIGGITIDKCTSVRDLGIWVDEKLQFRKHINIIVNSCMYKVRQILNSFRSSNLNFYFKLFNTYIRPVLEYGCEVFNPCSVSMSTSLEKPLRFFSRAVFKRCRVNYLSYADRLLQANQQTLKHRRVLLILKTYHNIISGWYHFPNISQYIKLAHTPRFPYLLQPRGKWTPNNFLHKYLSLWNKIAKKFPKTVSGATFHLHISALPLDSYL

SEQ ID NO: 2833 - protein, 1048 aa, synthetic construct
  source 1..1048: note = Description of Artificial Sequence: Synthetic polypeptide
  VARIANT 245: note = Any amino acid
  VARIANT 351: note = Any amino acid
RPAPPPPSQHTTKCRAKPAKTRILSWNVNGWSKRRSELATIIAKEKPDIVCLQETKLDKTNLGYTPTGYKVALASRNKFGGGVCTMVRDDWIFTISKTTSKKTAEILSITIDKLMVTNVYFPPRSSDSPTAEVREDVMEILDMASEKHIITGDWNAHAKTWHSHKTDERGAMIEDELDTRGVHVVLNEDSFTRAASGVLSSPDITISTSDLAACSSWRTCGVLNTDHLPVIIDTMAEIPKLVRPXRIMANFKKANWTDFSDSIETKVACYAGPRDAYSLENFLSATITRAASKHIPHGKFTPTREHTGDTGEIAELTRERERIQKRNPLDSNLKALNDKIEAARRELRRLXWHQKIEDMEDKRKIDCNALWRVIKGLKPKTKSTGSIRLPNGTTTTNPKTIANAMASSLVAVGKGRDCREERIAWRRTKRRLKKLRPQLPASSISHAEVKLAILKGKPSKALGPDGICHLHLKHVPDNCINLMAELFNASIDENKVPDSWKKANVFMLPKPGKDPSEIKSFRPVSLLSPVAKVLERIILERIRREIESPKDQHAFKKNHSTTTAITEATSCIVGGLNMEKPACRTIMTCLDMKAAFDTISIAKLLCGLEDAIADKKVCGWLGNYLHKRRINVQYDDVKSSWLTLRGGVPQGAVLSPNLFNFFIRDVPAIPDTKIITYADDMTLLVQDPLLSKAAEKSQDALDSLQKWFKDKHLDISAGKSTVTIFTADTKEFKYDPGLKWEGSVIPMQNRTRLLGVELDTMLRMTGHVEQVSARLAKANNILRALAGAKWGSSKETMLRTFKAIIKPLATYAGPAWHQLMSETQKTKLERQYVGGLKACCGLTKDTPRQLVYHETRMLPLSEELTLGSEQLAIAAIKTPGHPTSDLSRRRPKERTCGNRPRTPPLGCLEDRGDEWRRMRGDTRAVQKRNHTSFVKSYLSNHGIHPILGRQPPALSEEESTLPRNTRVELARLRAERSLLLEKYKAKVENRPVVCCIKCNDDVGDLKHFLKCYPVKPLPMSKLWKDPVAAATALGLAVTPFDPGGDADS

SEQ ID NO: 2834 - protein, 832 aa, synthetic construct
  source 1..832: note = Description of Artificial Sequence: Synthetic polypeptide
  VARIANT 35: note = Any amino acid
  VARIANT 71: note = Any amino acid
  VARIANT 643: note = Any amino acid
MPPGNEDRYRTRGIHSNWLQDRYGPEEQARRRSVXNGQARLGLHDHSIHDEESGLLITNVYFPPRSSDSPXAEVREEVLQILDMEDRKHILTGDWNAHSSAWHSHKTDERGSMIEDELDSRGNHVILNENTFTRAATGILSSPDITMATADIASRATWHTCGVVNTDHLPIIIAMDSEIPKREKPKRVIANYRKADWKGFKTDVETRIRSYVGPRDAYSLEKLISKAILEAAGKHIPSGRFVPTRECQGDTKEMDDLLKKRDEIQKLNPLDGKIAEINDVIEKSRRELRKERWLNKVEDMEIKRKTDSNCLWSLLKGLKPKARSSGPVNLPNGTTTTNAKAIANAMAKNLVTVGEGRENKDEKMAWRRAKRNLVKSKTTLATTITHAEVKLAITNGKSSRAMGPDGLCHIHLKNLPENGIHALAELFNATISENKIPDSWKKANVFMLPKPGKDLTEIKSYRPVSLLSPVAKVLERVILERIKPEIQSPTSQHAFKKAHSTTTAIIEVTNRIVGGLNMPKPANRTIMTCLDLKAAFDTVSIARLLCELDGAIQDKAITRWLGNYLYKRKIRTQFGEEKSKWRTLRGGVPQGAVLSPALFNFYIREVPTIPGAEIIGYADDTTILVQDPILQKAADTSQNALDXMKTWFDERHLDISAGKSSVTIFTADTKEFNFDPGLTWDGTPIPMQNRTRLLGVEFDTMMKMNGQVAKVSERLAKSNNILRALSGASWGSSKETMLKTFKAIIKPLATYAGPAWHQLMSDTQMAKLERQYIGGLKACCGLTKDTPKELVYYETKMMPLKEELELGSEQFAISAMRTPGHPAKDLHTRRPA

SEQ ID NO: 2835 - protein, 909 aa, synthetic construct
  source 1..909: note = Description of Artificial Sequence: Synthetic polypeptide
  VARIANT 287: note = Any amino acid
  VARIANT 427: note = Any amino acid
MMHRDGTGVFLGKRNTTSVSGGVGFIVNSTLLPKIQEIKFLNHRIAYLTFQVDRRLSCTVFQVYAPVADSDPEELADFYESLEEAYTACRSRYKLVVGDFNARIGPRQHTERFIGPHSMEPRNESGELLATLCESNRLWHMNSQFGKPSHRRWTHISPNKLHKHEIDHILANGKFVTDVSVVPSITTGSDHRLLRGNLHFNTKIARFEQVKRRKPPKRVLDPAVAHAITATATITPSADIDLDYINLIAMLKELQDQAVTQPSNHSTNRLSGTTRQLLTKRRFMDRXDPNFKSLSNECREAVKKDHEEFAKDRLLQAAQNKKSMKKVARDIQEYKTFIPCLKSSTSGTRITSRTEMEKEIQQFYSKLFRSNRGPPVIASPIGMEIPPPFLPEEVRAAFRSFPNGKAAGDDKITADFLKSCHDNVILXLTDRFTKYLQSGKVPEKWKTSNTTLIFKKGDKEDLENYRPICLLPVLYKAFTKCVLNRIRTTLEEAQPVEQAGFRRSFSTIDHIHSIQRILEVGREYQQPLTLVFIDFHKAFDSVEPQAIWESLKSQGVQPAYIALLQQCYTNCTTTITPFHKKIEIPITRGVRQGDPISPNLFSACLESVFNKMSWQHLRGDEDDENDKANLLPGIRINGQNLTHLRFADDIVLVASNPKAASLMIQELVEMCGKVGLRMNTNKTKVMRNKFASQSPVNVTLNNVTTCIEEVNEYVYLGRLLNHNNELEPELHRRRRAAWAAFNNIKNTTDALSCPRIRAQLFDSIVLPALTYGSEVWTFTQALSERVRVTHAALERRLVGISLSEQRQRNLHREDIRAQSEVRDPLLVIKKKKLGWAGHIMRRNDGRWTRLVQEWYPIGEKRPVGRPRMRWSDSLKEQISLFDGNHLKTHWSTIAKDRMAWKAVIRDHIR

SEQ ID NO: 2836 - protein, 898 aa, synthetic construct
  source 1..898: note = Description of Artificial Sequence: Synthetic polypeptide
  VARIANT 124: note = Any amino acid
  VARIANT 171: note = Any amino acid
  VARIANT 195: note = Any amino acid
VLVNRHEIQFLIDRAKPDILCLQETWLSEKTPSPTLVNPPSRYQIFRTDRAHEKRGGGVCTIVKSEIPAKVITSETKNMAYEILALDINISTTPIRLINVYRPPTCSYANTLTLLTKISDMTNXNGQIIILGDFNIKNIKWIPAGPMTKDRLGTILSDFCKNNNLKQFVNXPTRKNNILGIVFSNTKLENVEISXPIGSSDHRKITFTLDILEKPTKHLIEIWDFKGINWKVCAAELNLIDWPTIIDPVKTISEIYNEFLTIMRRICELAVPKKRINKELYNVPEYLVTFHKTIENKFDKLLKSRSWADYALYIELSRKFRKKLLKFRRNQELLTLKKSGNSHFTHIAKNILKPKFSMVPTFVDQSGHHATSDHEKAEVLAVNFESQYVNKSNTSFTLPPDYKSDQEIPWVTDAEMLKFIQKCKNSCSDTPDKVPFKFLKLIAPFIASPLSQICNLSMMRGEVPEKWQQSIITPINKIAKPQVPTDFRPISITSQICRIYERCILSKLLPFLDKIRFWNNNQHGFRPKRSTVSCMLESLNDWTNSIERGSQVDVIYFDYAKAFDRVPHDLLLDKLVSIKLNGNLLKWLASYLSNRTFTVKVTKNQSSTKMAQCGVPQGAVLSPILFGIYVNEIPSKLPMGVHCKQFADDIKLYSEIPKDSDPQNNKLQQAIDAICQWSETKKLALNNSKTILISLGKTTKNCDYVINGSPIGRKQLTRDLGFMISPKLDFSEHWHKATNQAKYALSLIFKKYCSDNSRLLTLLYKIFIRPILEYGTVISNPHKKSDIKSVESVQNAFTRRLYSRQKGRYIRADDPEYLSAPERNSLYGLSSLENRRKYFDRKFLTKMIAGNVDIDTRPFFTFFQNTRTRAKTKFIWARSKTKIRQEFFTNRTLTAITL

SEQ ID NO: 2837 - protein, 588 aa, synthetic construct
  source 1..588: note = Description of Artificial Sequence: Synthetic polypeptide
  VARIANT 34: note = Any amino acid
KILVSGSSKNFFKFINQRMKESSDVGMIMDGKTXVYDNYRKAELFAESFGKVYSTDDGQYTTCDLRTSAHLSEIIFEPYAVELELSKLASKVNTSPDEIPAIFLKKICTSIALPLSIIFNTSMRTGFLPDLWKTAIVKPLFKKGSRSDANNYRPISLTSTICKTMERMIRKEMMKHIYGNKLLSNAQYGFRPHRGTEAQLLHYISCIQSNMEKKKDMSSVYVDFRKAFDTVSLPKLQIKMESYGICGRLLNWLSSFLTDRHQSVVLNEVFSPRMVVKSGVPQGSVLGPVLFLLYVNDIGDSLECDTLLYADDLKIFSTDSAALQRDLDRISNWCRTWQMDVAPNKCEFITFNYSKKNSALSFPLMIGNFNLQRTTEIRDLGVIFSNNLSFKSHISVIVRKAHQRINILFNIIRLSTIDVFIKCYVIYVRPILEYGSVVFSPISKELVKTIESLQKSFIYRCYKKFGIVYNSYFEALEQNNLETLERRRLMADLVFIYKWLVSREINIGHDLFISSANLLPLRRHNYYIRCQLTGATRIGSQFLSNRIIRCWNSLPVKTFPVKFSSTAFKNRLQNLSLNNFLLLHFHNF

SEQ ID NO: 2838 - protein, 434 aa, synthetic construct
  source 1..434: note = Description of Artificial Sequence: Synthetic polypeptide
  VARIANT 16: note = Any amino acid
VIPIPKKGSLSSPENXRPISLTDPFARLFERVICEYIKLHFAHKFSQNQHGFLAYRSCTSSLVHSISCYKSSLSSNNSLDVIFFDFKKAFDKVNHKLLLQKLALFGIPHLFIEWFSNFLSGRTFSIKIEDFTDTSITQIPSGVPQGSVSGPLLFLIFINDLLLDLALIPSLQVSAFADDIKIYSSNPVAVQKGIDLIETWASSNSLPLAHTKTSLLRLGSKNISFPYFIAGQPIETSKSVRDLGLITDSTLKFKSHINKTIASALLRTKQLLKSFKSTSPQFYIFLFNCYVLPIIEYCSVVYSPPPASKLSLSLETPLRFFTRKIFQRCNITYSSYSDRLAQLNLFSLRHRRLKAQLLLLYKFLSGTSYFPHLDSYIRFSSSTRRPMNLICIKPKCSDFFSHTIPIWNAITSQSSYFLSPSEFNTLISSSITRY

SEQ ID NO: 2839 - protein, 940 aa, synthetic construct
  source 1..940: note = Description of Artificial Sequence: Synthetic polypeptide
VQKGPNSLAVDNSTKQVKFLSVGYANCFSVKNKLAQLELVTITNNFDIVCLTETKLDNTFPDSLLSLSNNFSVVRKDRNKHGGGVAILISKSIRFLPIEIPSSLLSSEIAGVDIMAGGVSIRIVVGYHPSHHSKLDGMISCLEFLLSTRKNCVILGDFNMPHISWPSLTASDSHCKKFLSFVTKNGLTQHIASPTRLKPDNILDLCFTNTDILRDVRVGDLFSDHKLIHVTLSVKNRTKKLTKEVKLFRKADYASINYLLSNTDWVLRFSNLNADGMYENLLSILHELIASYVPVKAINTLSKRHSAEILKLQKAKLNVWRKEGNSTNYKNISADLKVALIKEERRVNDEKLTNGSVKDFFKFINSRYKDNQEIGTLKNDSGAPINCDSEKVELFSDSFSKVFTEDNNVQPHFDKRTEELVSSPDFEPYIIEHTLSKLTPKLNTTPDGIPALFLKNVCTAIALPLSIIFRESFRTSIVPTAWKTAIVKPLHKKGSRANPNNYRPISLTSSVGKVMEKLVRKQLTNYLNSNRLLSNCQYGFRSSMSTEAQLLSYQADILTNYICKKTTHSVYIDFKKAFDKVSLSKLKIKLRSYGIHDDFFNWLCAFLTNRTQRVCINNVFSSDRSVLSGVPQGSVLGPLLFLLFINDIGDAFESNYLLYADDLKLFSTNADCIKKDLVRLSVWCDNWQMGVAPEKCEVISFNHSKKHSNSASLNFSINDAIIPQTKIIRDLGIIFNSDLNFSNHLDVTLRKAHQRVNIFFNVLRHADFEIFIKCFKIYVRPLLEYGSTVFSPTSKEQVRLIESVQKTFIFRVFRKFNIPYISYFESIKHCDILSLEHRRIIIDLVFMYKILVSKEVRIYNDVHISLPRFSNNLRRHPYYIKSKLSNSTKNTCQFFTNRIISCWNKLPPHIFPSFPNSDVFRCNISFNFVEPFLILKHSNF

SEQ ID NO: 2840 - protein, 1066 aa, synthetic construct
  source 1..1066: note = Description of Artificial Sequence: Synthetic polypeptide
  VARIANT 82: note = Any amino acid
  VARIANT 212: note = Any amino acid
  VARIANT 711: note = Any amino acid
  VARIANT 771: note = Any amino acid
  VARIANT 943: note = Any amino acid
  VARIANT 978: note = Any amino acid
  VARIANT 1000: note = Any amino acid
  VARIANT 1033: note = Any amino acid
MLDTADSGRPERRSALIAHELSRLNIDIAALSEVHLHEEGSLKEHGASYTLYWSGKPKTERHLSGVGFMIKNSIASKLENLXTGHSDRIISLRLPLHNKQHVVLFSIYAPTLQADHAEKVKFYTDLRRLTQKVPAGDKIIILGDFNARVGKNYEAWKGVLGKHGVGNCNDNGRLLLEFCAEQQLTITNTIFQQKDSLKTTWMHPRSKHWHLXDYVLVRQRNVGDVRHTRAMPSAECHTDHRLVRCKLTLYFKPKPKRGGIPRRRLKVNDLQKDTVRNSFQVNLQARLLDHPIDPSPEALWQHIKNSILQSSEESLGFSSKKNKDWFDENNQEIQELLTKKRTAHQAHLAQPSCHVRKAAFHLACSKLQQKLRDIQNKWWINLAEKTELCAVTGDHRGLYEVLKAVYGPTHQVQSPLLSADGQMLLTDKTSILNRWSEHFQTLFSASCVVQGSAIQHITQQPVKTELDIAPTLGETLKAIQQLKTGKAAGVDGIPSEVWKHGGQALHAKFHELLVSCWEQGKLPPDLRDAVIITLYKKKGEKSNCSNYQGITLLSIAGKILARILLNRLVPAIAEEVLPESQCGFRANRSTTDMVFVLRQLQEKCREQNKGLYVTFIDLTKAFDTVSRKGLWQILERLGCPPKFLKMIILLHEDQQGQVRYGDALSESFPIINGVKQGCVLTPTLFTIFFSTMLQRATADLDEENGIYIRYXTDGSLFNLRRLKAHTKTLNHHVPELLFADDAALVAHTEAALQRITSCFAEAADLFGLEVXLKKTEVLYQPAPQEDFHHPHITIGESELKSVQQFSYLGCIISSDAKINKEIDNRLAKAYRAFGRLHKRVWSNKHLKKSTKISVYRAIVLSTLLYGSESWVIYRHHLRLLERFHQCCLHTILNIHWTDCVTNVPVLEQAGVTSIEAMILRTQLCWAGHVSRMEDHHLPKIVLXGELATGCRNRGAPKRRYKDSLKQSLSFGHTDCHQXSTLASSRETWRHTIHNAAASFXNTHRISLEEKRQHRKNRALAVPSQETFCCAFCXHTACPTLALSAISVLAASVGRALLKSSFVKPSH

SEQ ID NO: 2841 - protein, 1088 aa, synthetic construct
  source 1..1088: note = Description of Artificial Sequence: Synthetic polypeptide
  VARIANT 129: note = Any amino acid
  VARIANT 831: note = Any amino acid
MTSLTTMAAIATTHARTDWMTNQPNMAERTDNDSLVIGTYTATVHLDSTDNDALLRSHYNLNQVLQTNQQEQDNTPINFSPYYDHEHLIQHLAQPTNNVKFKILSLNCQSLNAKFDQLMILIAQLNHNXVIFDAICLQETWIKESELPPVFNIKGYQAIHQARHCSGHGGLLIFLKDSYKFKIIPFEKSAVWESQFINIDFENGNKDSLLVGNIYRPPHKVKDDLDLFSNQFTRNLLQCSKYKNIAIAGDFNINLLDVNSTTSPAAHDFPSSIISNDFLPKITLPTRISESSSTLIDNFFCKLKNDSTSSGVVIHKISDHQAYFTCLPIRSNKIHNIEKIKMRRVSQESIIAIGNDIRNATGRLDLSTETDPNVNYEALMETLHDSMSQHIPIKEVKFNRHKHKGSSWITAGIVRSIRERDKLYCKLIKAKPNSNKRESIKLTLQLYTRILQNIIRKAKSSYYSMHFAQLKNDMKKTWKAINDILHRNKNSLNRNYPEQFKINDQLISDKNIIAEEFNSFFTSVGKILASRIAHNSTNTATDYLSGNVTSRFVLQKVSESDIERIIAQLKSVSSCGYDMVTPKLLKALSPFLIMPLTIIVNQAISTGIFPDSLKRAKVVPIYKKRCPFIKKDDETVLTNYRPISLLPAISKIFEKVIHNQLQHYFTSNDLLYHSQHGFRPKHSTELAALQLLDQITTDLDANKIPIAVYLDLSKAFDTINHNILLKKLNYYGITGTAYEMMKSYLTNRKQYVSFADCNSRDIMIDTGVPQGSILGPLLFIIYINDLHKSCSNFLPIVYADDTTLYKTINSPNSINSINQELEHVNLWLKIXKLSLNASKTRYMVFHKPRKRLPTLNISIDNENVERCISFNYLGIHLNQNLTWNDHIKRTSLKIARATGRINCLKHFLPKKILLTLYNSLILPHLTYGILAWGAKSNDIAKLQKKSVRIITASKYNAHTEPLFKAHHLLKIEDIYKVYQLNFYFKWKNGNLPKYFNSFSCNTNRDTHSYHTRTTSTVSARVNHEFAKHSLRHSLIILLNQTPNIITDKITTHSYHGFSSYVKNYYINTYTNVCYNSTCYICRNQQQLL

SEQ ID NO: 2842 - protein, 873 aa, synthetic construct
  source 1..873: note = Description of Artificial Sequence: Synthetic polypeptide
MTMYIKDHIDYTMLDIGEDTCEVQAARLLMEQGQATIFASVYRSPNSSKENSDNINAFIRNFSNERAYTLIAGDFNYPTIGWKTMTGRTEADIEFIEALRDGFLIQHVDRPTRGRGSNNPSLLDLVLTKEHTATPTVEYHQPLGKSDHSILDIRIEMKQSETFIKTIPNYNRGNFDRMRRVLSDVDWEEGLGREETTQKKWELFHETITNAVNRCVPKIKIKRKVLKNIPVDNKTLTKIRRKKRLWKQYLETGNQTIYHDYCRTRNQVRQLTRKNMRELEKNIAKEAKTNPKKFWAYANQKTKYRETIPQLLKTGNPNDGMLTENNQEKAQTLATFFNSVFSEKPNDHWNLSPSSYPTIEQDLIITEASVLHHLSKLKKTKSPGPDGIHPRILIEIKEIIAKPLSIIYQHSLDQGQLPDTWKTANITAIHKKGDKRIAGNYRPVSLTSVPCKIMEKIIRKSIMDHLIRNNILSNKQYGFITGRSTLLQLLTVLDQWTEILDRGSEIDVIFLDFKKAFDRVPHQRLIDKLEYYGINGKILTWISAFLINRKQRVTIHEATSAWAEVKSGIPQGSVLGPTLFIIFINSLPDVTSSPTFLFADDAKIFREITKPTDSLLLQEDINNMYHWTLESLLTFNPDKCSSMTISRSGTNHRQYQMNNSPLNKTIIERDLGVILDNRLTFDHHIQAKIKKSNSIMALIRRTYTYLDNHTFLLLYKSFVRPHLEYANQVWKPHLQKHITAIENVQRRATRILPGMKDLNYEQRLRKLKLPTLQYRRIRGDLIETYKIATEYYDTQITQNFFQFNSRTSRGHPLKLYHQPARTELRKNSFKIRIAQLWNQLPSEIVASPSIATFERRLDHHLKNHPKHNPFRPP

SEQ ID NO: 2843 - protein, 601 aa, synthetic construct
  source 1..601: note = Description of Artificial Sequence: Synthetic polypeptide
  VARIANT 578: note = Any amino acid
QLIKDKKAAYYKKLFSEANHKETFQLLKGTTKPPAKVLRQEQEDVTLAFEFQQFFNTKIRKIHDTLQTDENNSPHSHDKRTSASFTAFRTHTQSQVEKIIKSAPSKTCELDPMPTWLLKEQNVLDQVLPWVTGITNSSLELSHVPKDHKTANVKPRAKKDGAAYFDLSSYRPVSNLQFLSKVLERAVASQLTEYLEKETLMDPLQSAYRRGHSTETAVLKVKNDIDLAIDEGDGIILVLLDLSAAFDTLDHAILLKRLEKCLGIKGSALDWIESYLRNRPQRVKVGESYSSDSILQTGVPQGSVLGPLLFLLYVLPLQEVISRFRIDRHHYADDTQLYGRIRLNSIKTIDEDVREMEASIQDVRIWMKKNKLKLNEKKTEALIITSKEMKKHAEGIKLKIGGDTVTATSKVKNLGGWFDEHMKMQEQVNRTTKAGYFHLRTINRIRKNLDTPTCAKAINATVTSRLDYHNALISGARQCIMKPMQRLQNHSARVITMTDKREHIRPVLEDLHWLPVKERSDYKVLTFVHNALHDELAPAYMKEMYRVYHPNRALRSGEDRWTLTVGTAARHEGHRSPXIHGAIMWNTLPEALRSEASHPRF

SEQ ID NO: 2844 - protein, 1205 aa, synthetic construct
  source 1..1205: note = Description of Artificial Sequence: Synthetic polypeptide
MTILQWNCRGFRANFQELKTLVAQKDATVLCLQEIKVKDSDSCSLNGFNTLKKCTLGIDGRAVGGAAVLIKKDTPHQHIPLTTNLQAVAVRVTLHRLLTVCSIYLPPGRSHGDLVELDRLVQQLPPPLLLLGDFNAHSELWGSEEPRPSGRVVEDFIAGNDLSILNTGSQTYLHPASGSFTVIDLSLCSPSAHIDFTWEVDTDQHGSDHFPIFISSECRPSLSHPKWVFKRADWTAFGSLCEIEITEDIFEDVDDPLDIFTTLLIKIAHETIPKSCSSTKCRKPWYTDECKKAIRLRRAALQKFRHHPNDDNLLSYRKAQAVVRRVIKASKRASWKNYISKLTIRSSVKKTWDMVRKISGKYKGHQIHHLTTRSGDTATDKESIAEALADEFALNSSTSHYTDKFQKYKDKAERKVLNFNSNNTESYNLPFTLLELLMSLKSSHDTSVGPDDIHYQLLKHLPINCKMILLNLFNRIWVGEPFPSAWRNAIVIAIPKPGKDISLPTNYRPIALTSCLCKTMERMVNGRLVYFLEYNNLLSPSQSGFRSQRSTADHLVSLETYIRDGFAHGDHVLSVFFDLEKAYDTTWKCGIISDLFNMGLRGHLPVFIRNFLSHRQFSVRLGSVDSSPHPQEMGVPQGCVLSVTLFSIKINSITNAVGADIHKCLYVDDFTISYRSRYLPTAERKIQLALNGLQKWADESGFRFSPTKTVSVCFSGRRGVFPDPLLTLNGQKIPIVEKTKFLGVIFDKKLNFKEHIQFLRGKCQKVLNLLRVISKMNWGADREVLLRLFRSLLRSRLDYGAIVYGSARISYLERLKPIQNQALRLCLGAFRTSPVTSLHTEANEMPMAIRQKLLSVQFALRVCSDTTNPAHQCIFNYNNDRFYLSKPNAIRPLALRIKEDLQTICPDIKAITPNQLFNTPYWLLRPPELDISLIHFGKKTANPNYTLRNEFYNLMDKYPDHKVIFTDGSKSDSAVACSATADNLRIQIRLPDSASIFSAELLAIYQVLTLLECSANDQQQFLIATDSLSSLQAIGNFNIKHPYVFKILEKCTLLHKKGIDLVMAWCPSHVGVMGNERADLLAKEALSFTTCTIRIPSSDFKPITHEFYKEKWQEQWSSEQENKLYCIQPTLGKWAKSSREIRREEIVLARARIGHSHLTHGYLLRREMPPVCIPCQSILSVKHIFIECVDFDILRRRFFNVSSMK

SEQ ID NO: 2845 - protein, 538 aa, synthetic construct
  source 1..538: note = Description of Artificial Sequence: Synthetic polypeptide
LDCPQIPDPHFTVENVLSVLASLDTNTAFSPQDIPPIILKKCRSLLAPSLCIIFNVSIRCKTVPLEWKKARVVPVFKKGDKSAVSNYRPISILCIVSKVMERCVFNHMYPLLSSFIHPLQHGFCKGRSCTSQLLDVYNRIGSILDKGGQIDVVFLDFSKAFDCVSHKLLLYKLKHFYGVDGNLLEWIRSYLSERSQSVIVEGKSSTWLGVPSGVPQGSILGPLLFLLFINDMPYKTLHCTTALFADDSKCFKSINTTHDCELLQRDLNAMHEWSLIWQMSFNPSKCKVLSITRSHAPIHFNYAMNGVILDHVNVFKDLGVFIDQTLSFSTHIESTILKCNKMCGIVKRTIGFNAPVNVKSSLFMSLCRSHLDFASPVWSPHLKSKVKQIESVQRSMTRFILNNADLSYIERCQFLEILPLSFRREITDLLFLFKYFNGAMNVDFTSIVAKRCFNTRLRSGPFIELLTPTPRTDSFINFYFNRVAHMWNILPLEIRSCLSVSTFKSKLLSFYSNKMCFYDVNNSCTWTSTCRCNGFYHT

SEQ ID NO: 2846 - protein, 1075 aa, synthetic construct
  source 1..1075: note = Description of Artificial Sequence: Synthetic polypeptide
MWKVIFVICVLSQIKAKTGSGETRPGFTICLPQPRHASPTSMPSLCLEFIRALAVKAPARLPTDLYKRLNGLRISRRRLSKRGTKGYGRGVIPVQVSALRSADRYVNTARRDASLPTSLVTIEPMTIASSSSCVLLNCRSICNKASEIRDFISDRRMDFLCLTETWLTGTDEDKVVSAALLPDDYAMVHRPRDARGGGVAFIHRRSITLSQIRLGDYSSFEVLDALVCTARRLRMCVVYRPPPSRRNNLTVAQFMSEFADFLSDIVSLPGEPLIVGDFNFHLDDCGDADASTFSDLLTSFGLKQHVRGPTHEKGHTLDLVITKTDTALIWSSVSRDLCISDHYPVFTTLAIPKVLNPTREISYRRIKAIDKEQLDRLIEASSLSSPPENASLDENVTNYQRTLTGILDTIAPLRSRTVRIRVNADWYNDEIRAEKQRRRQAERRWRKSKLPADRELFKVAKNRTQSMIDEAKSLHFREKVSACSDDPKQLFRVVDTLLGNSTESPLPVHDSRVELSNRFSDFFVEKIATIQSAIPSVDNPPRPQAPLPQSQLATFQPLDVADTCALISGAAPKSCELDPLPSPLVKDLPSLRPIITRIINQSLATGVFPMEYKSAVVRPLLKKPSLDRDSLKNYRPVSNLSFVSKLIERAVASQLASHLRNNDLMEPRQSAYRPGHSTETALLCIHNEIVCAIGEGKAVLLVLLDLSAAFDTVHHPTMLSSLERLGVTGTPLKWFESYLSERSQAVQIGDAKSDPAAINCGVPQGSVLGPILFTIYTSSLGALLREQGVSYHLYADDSQLLLTCDPRDPAPAVARMEACIRSVQAWMSCHSLKMNGDKTEILLITSKPMRKVLPDVQLCIDGHQLQPSTTARNLGVTFNRHASMESHITSVCRLSYMQLRRLRRIKKLLPRDVLESLVHAFVTSRLDYCNSLYLGIPQTQLDRLQRIQNSAARLVTDSGAREHITPVLQDLHWLPVKERVIFKVLLIVFKSVHNLTPQYLSEMITVHIPTRHLRSSNQNFLTVPFTRSSFIKNSAFSVAGPTIFNSLPINIRQAESVPIFKRLLKTHLFHNYFLT

SEQ ID NO: 2847 - protein, 659 aa, synthetic construct
  source 1..659: note = Description of Artificial Sequence: Synthetic polypeptide
MIYCLPTYIRKLERQKPMIKTIRQWTEDAAEQLGGCFACTDWNIFEDTTTNINEYTNVITDYIKFCEETIIPTKEIKIYPNNRPWVTNDLIHAVRKRRRLWMSGHHEECKEAQKEVNTIIAQCKDNYKKKIEESFRSGNPKKTWSGLNTITGYKKKPMTRTSISNDEGWANELNVFYTRFEKEDEDLVFDQPAIAPIRFEEEDVRRVFMGIKQDKAQGPDGLSPRLLKACAQDLAPVFTGLFNRSLEESCVPTLWKCSTIVPVPKRPTAKELNDFRPVALTSIVMKSMERLVLRRLLHQVQLSMDSNQFAYKARRCVEDASALMVHLVSEHLETPGSYARVLFVDFSSAFNTMRPSILISKLEAQGVAPPLCQWILSYLKNRPQQVRVNQSLSTIRHTNIGAPQGCVLSPVLFTIYTDEHRATSQETRVIKYADDTALVALLSPGKEHLYTDAVSHFIDQCDNDDLKLNSTKTKEMCIDFRTHNTIITPIIIKGQPIEQVTTYKYLGITIQSDLRWTSHISTQCKKASARLYHLRKLRQFHVDRHLQELFFTATIDSLLLFGITVWGGRCTARDRNNISRVQRIAGKIMNTTVQPWGVSHRQRTIMRAKKIIREPLHPLHYTFQRLPSDRRYRALKAKTNRLRQTFVPSAIRLINSQPI

SEQ ID NO: 2848 - protein, 758 aa, synthetic construct
  source 1..758: note = Description of Artificial Sequence: Synthetic polypeptide
MSLTHEHLSIKVIDVDRSVTSDHFGVVFTINCPKPAREKQKLKVRKWKNVNISALDETIASHIPAIESAQDPFAAYNNCLTQVVDEFAPETTIEVTKRTDTPWYNAELRHLKTECRRLERKWRRTQLKIDQEIYRKKCRCLRRLRDRTKMTYISSKLQNATSTKDTYNILNQLLHKQSSSPLPRHDDEIELAETFSSFFSEKIERVRSAIGAHPDPDVTIEHHLSTEITPLTSFRPVSRDWISKTLSSTTPKSCNLDPIPTALLRKCPSAVPLLCFTINWSLANSTMPDSHKTAHVRPRLKKTSLDHDQLKNYRPVSNLSFISKMTEKAIVAQLKDHCFVNNIDVQMQSAYRAGHSTETAMVRVQNDLLDAVDRDGGAILVLLDLSAAFDTLDHPLILHALKYNIGVTDSALKWFESYLTNRKQLVTIGSQTSDTKNLVYGVPQGSVLGPILFTMYTRPLSNIISNCGMNHHLYADDTQLYIAVNVRSPTSVSSVKESIQECSNQVHRWMTANFLKVNEEKTEVLVITKPSLTEIAPSSFNIIGETITSSASVRNLGVMLDNKLSMADQVRNICQKSFFHLHMIRKIRNFITEDAARQLVHANVMSYIDYCNALLAGSPSYLIDRLQHIQNCAARLVKCADRHSPSLPLLKELHWLPIKFRIMFKINVITFKALRGLAPPYICSLINVYTPARSLRSSNFTLLSVPKFHLQSYGYRTFAHQAPILWNRLPSNLQNQQSLDAFKAQLKTYYFNIAFSSI

SEQ ID NO: 2849 - protein, 693 aa, synthetic construct
  source 1..693: note = Description of Artificial Sequence: Synthetic polypeptide
DDLNDLVSSFNRRCLDVTNAHAPLRQITLKGDGMKPWYSDAIHSARVVRRKYERQFRKSPLEVHRQIYVDQCKEVVQLIQNTKKEYFHQKFASASAKEVFRLVDNLLHKEPNHTLPTNVPLGDLPQTFNKFFYDKVHQIRAELDASPTLPSLTTPQPLVAERGGAPALETFEICSAEDLRKIIQTSGSKTCMQDSIPTPLLKEGAVLEAALPAIVNIINRSITEGCVPAELKKAVIAPILKKTGLDPNNLAHYRPVSNIGFIAKVMEKVIARQLTDHLTRHNLHDQLQSAYRKGCSVETSLLYIKSDIELILDAGDAVLMILLDLSAAFDTIDHALLLTRLSEIGLEGSALAWVKSYLMERTQVVRIGDKISESSDLDIGVPQGSVLGPLLFLIYMIPLGSIIDNRGVLRHSYADDTQLYCRVNIKDPTKLQKQIRDMEECITSVRSWMKSNKLKLNDAKTEVLLISRHEPRQPVEIRVGNAVIKPAPLVKNLGAYLDCRLSMKDQVNRTTSAVYYHLQRIAKVRPFLSDSACANAINATVTSRLDFQNALLMGLPDCQLRKLQVAQNNAARLLTRTKKREHISPVLTALHWLPIKHRIEFKVLSMIHKSFHSLSAPDYLKKLCRPYVPSRNLRSGDDPFKVVQLRTRNLYGARTLGGLGARLWNALPMSLRKPMTFSTFKKNLKTHFFRISQ

SEQ ID NO: 2850 - protein, 793 aa, synthetic construct
  source 1..793: note = Description of Artificial Sequence: Synthetic polypeptide
  VARIANT 14: note = Any amino acid
  VARIANT 40: note = Any amino acid
  VARIANT 97: note = Any amino acid
  VARIANT 99: note = Any amino acid
  VARIANT 102: note = Any amino acid
  VARIANT 202: note = Any amino acid
KMFLDLMHSHAFFXLIDKPTRITATTSTLIDNIFSNVINXTHLSGVLYTDISDHLPLFTVNQFICRNNSIVTKTIGYRSFNETNKLAFQNAPLAIDXDXLFXCHNCGAAYTLFTSNFVDCYNESFPIKSHKINPKRNQPWLSPELKRSINRKNRLYRRYHARPSVFNEINYKSYKSMITKEIRVAKRTYYHDLLEQNRNKIXKTWDIIKEVIGIDNTKKPIASITINDSTVSEPIEIAQHFNKYFSSIGNNLASSLPINHLDPMRYMNPNTPRSLFLSPVTSNELYTIIFNLKDASAGIDDIKPIIIKEFSQLIIKPLLHIFNLSFTQGSVPCAMKKANVTPIFKGGDPTSLGNYRPISVLPVFAKILEKLMYNRVYNYLTENRILFNKQFGFRRGYSTEMALLTALDELSSALDMKRNVIGVYLDLRKAFDTVNIDILLAKLFKYGIRGIAHQWFTSYLNDRSQRVKIGCSFSEMKSISCGVPQGSTLGPLLFLLYINDLPNVLTNIFPIIFADDTSLFMTGVDINDMTEAFNHQLSKINEWLIANKLSLNIQKTYSMLFTLSPHLYSSPIPITINNTEIQRVHSTRFLGVIIDDRLTWANHITHVSNKIAKSIGIINKVKHSLKQDTLMILYYSLIYPYLTYCFLLWGKASHSHINKLTILQKRVIRIITNSGFRDHTRPLFNTLRIIHMDDLFTYLCSVYIFKCIKIIFPRSFLDILNYFTDYNSNAPRSSTRASLTRSIIVPLCRTTLRQKQLRFQSIKLYNNFLMPLEILDNSNSISHFRRFLKNVLS

SEQ ID NO: 2851 - protein, 661 aa, synthetic construct
  source 1..661: note = Description of Artificial Sequence: Synthetic polypeptide
KRNQLTRATRRAKIKYYSDKINESASPKEIFQVTSFLLQSKREVVLPKATTMSSGSLADEFAEFFENKITAIRNGISAAPVQSSPLSDVVALHTFALTNAEEVSTLIRKSTSKSSAVDPIPTWLPKKCILTFSPILAAIVSASLVSGCVPDQLKAAVVTPLLKRPTLDPEVYKNYRPVSNLSYVSKLIERVVAERLKEHCALNNIQCKFQSAYKQNHSTETALIRVHNDILRAVDRDGGAILVLLDLSSAFDTIDHTLLLHHLEHQMAIGDTALKWFSSYLSERTQRVKVKESLSSPRRMLYGVPQGSVLGPVLFTLYTSPISAIIRAQQLQYHLYADDTQLYMSFTPTSAASTTSSGASMESAVSAIKRWMDDHYLKLNEDKTEMLVIQRPNPRSSQPTHRPTLTLDGNNINPSTSIRNLGVLFNSAFNLEDHVNALCRTMFFHVNRIWRIREYLTTSATRALMQAHVISRLDYCNALFYGLPVVVRNRLQKAQNAAARVVVRAKRSDHITPILLQLHWLPVEFRVQYKICLMTYKALHGLAPAYIDELISVHRPTRRLRSSSDIRISPVQYKLKSVGGRCFSSAAPSLWNELPQSIRLSSHLLEYKSKLKTHFFRKAFNDIYLNKSTSYHFIYILLYIAFEQFYFFLNFAIHKFEVINK

SEQ ID NO: 2852 - protein, 508 aa, synthetic construct
  source 1..508: note = Description of Artificial Sequence: Synthetic polypeptide
  VARIANT 379: note = Any amino acid
MSDHFIHGCPELYVHLSLFLNAMLIHLDVSSVMSRSVLVPIPKNRKKSMNSASNYRSIAISSIVGKCLDNVILVKHADVLSSCDLQFGFKRTHSTTQCTFVLNEVVDFYMRGGSSVYVTLLDATKAFDRVHYTKLFRLLVDRSMCNATAKLLLCMYVNQSLVVRWQSVTSDSFPVTNGVKQGGVLSPMLFCVYIETLLERLRRSGIGCYIGSTFAGAIGYADDVALLAPSLITAQKMLNVCEDFSREFFVQFNSSKSKAIVFNAPPNAVRSMRKLTLNGSPIDYVADALHLGHVVGDKSASLNMENACRDLVVRVNMLCSNFNFVHLDTILLLFNSYCTSYYGCSFWDFSPRTINGFVVCWRKCVRRLLDLPYRTRSKXLHLIVLKPEPRHQLFFRFQSFYVGCTTSTNHIVSLCTRLLPFSSSSVACNLRQLMSFVNINYDQLNNLIDNHSIRKRLSEFCEATTDQESLCCASSVIELMKIREGSLISPINPTEATDLLKHMCCSND

SEQ ID NO: 2853 - protein, 722 aa, synthetic construct
  source 1..722: note = Description of Artificial Sequence: Synthetic polypeptide
  VARIANT 202: note = Any amino acid
RTGSSRHSMLSLLLPASPMPWKSSETLTTLLTSTHTTKYLPQHLTDMHLRKPESSHYALTLLGTMMNSEHQNMSEKEGTQVENKWSRDRKETYKEQRDIYNRLLNQTKTQYYSKMVTDKARNPKDLFQLVDLLIHGKETNPVLPEHTSLDELSDRFATFFSEKIETIRLNLSNRQTDSQLLVHQEAEPELVSSWMVFSRVTXEEVTRVIKKSPSKTCSLDPIPTWLLKACLPALCETITAIINDSLSSGYVPDSMKVAAVSPILKKTNLDQNELKHYRPISNLTFVSKTLERIVAHQLNIYMAENHLHEQFQSAYRQHHSVETALVRVQNDILMNIDRGDAVLLILLDLSAAFDTVHHDTLIRRLEGIGIGGIVLNWFRSYLKDRHQSVTIDKHSSPRRQLGQGVPQGSVLGPILFSIYMIPLAQIIERHNMSGHYYADDTQIYISFRPSSPLADIEAKANACCSEIQQWMARNMLQLNEGKTDVILFGTKNILRTLDQKASISIGGSVVLSSASVRNLGCVQDSELKLDLHVNQICRSAYYHLRNINKIRRYLPLDVTEQLVHSFVTSRIDFCNSLLIGIKKANQQKLQRVQNAAARCILYIKSREHITPYLHALHWLPVEYRIQFKVLLLTFKSLNNLAPAYLTSLLHQNAVLASSRRNSSRLLSIPRSRLVGAGDRAFQHAAPTLWNASPPAMRTLSDVNVFKKGLKTFLFRRAYSDYC

SEQ ID NO: 2854 - protein, 693 aa, synthetic construct
  source 1..693: note = Description of Artificial Sequence: Synthetic polypeptide
  VARIANT 297: note = Any amino acid
  VARIANT 406: note = Any amino acid
  VARIANT 590: note = Any amino acid
ISSNDPCDAYPRFLNKITTHYESSFPIIKKKPKKRDNNKWITNGLIISIKYKNKLYLDYKRHETIANELAYKKYKNRLSGIISQAKKNYYQGLIDENRHNMKNLWRTLKELIGSKKRSSLSNEFLINNKPCKDKDMISNTFNQYFVNVGPKLASIIPNVDSNPEDYLSGSYPNSLFLTPVTINEIKLALNKLKTTASAGQDKLKPNIIKLISDEISLPLTHIINLIFEHNKVPDEFKFANITPIYKAGNSMEVQNYRPISVLPAFSKLMERLLHDRIYVFLQQNEIISDYQYGFRKXFNSEMALAVTTDNIISSLDSQKHVMGLFLDLKKAFDTVDFNILMKKLVHYGIRGNALDLLKNYLSNRKQSVKIENSVSSELPVTCGVPQGSILGPLLFLIYINDLPNAXTSCNPIMYADDTNLFLSGKNIDEMENKFNTDLVALTKYLKCNRLSLNVSKTHSMLFTLNNSLRDSSLSLSIDGSIIDTVKCINFLGVKIDNKLNFSEHITHTCNKVSKSIGIIRKISKTVNRPTLLMLYNSLILPYLTYCNMIWGKSANIHINRLFILQKKALRLINKAPLLTHTAPLFHECSXLNIHDLYIYRSTIFIFKLSHHMLPTPVSKFFNLTPLVHGLNTRRQLNYKVIVPFCRTSLGQKSLNFNIAKLYNNILQPLSLLNLDSLEKFKKSIHCILVAKYL

SEQ ID NO: 2855 - protein, 468 aa, synthetic construct
  source 1..468: note = Description of Artificial Sequence: Synthetic polypeptide
TLKIAQVKPRPKKPGVNTMDPKLFRPISNLPTIEKLLEKCVIRDLHLYIQQHNIIDPLQSAYRPGHSTETAMLRIQSDIKTSLDEGNGVLLVLLDLSAAFDTLDHNILLSRLQNSAGITGVAIDWMKSYLSSRQQFVQIEEKRSVTHDLDIGVPQGSCLGPLLFVMYTTPLGAIFRKHGLSYHQYADDTQVYCSLPSDDQNSLKNVLTRVEKCLDEVKCWMTQNKLKLNESKTECIIFSSKRNKQLFHQTTIRFGGSVITPVTSVRNLGAHLDCEMSMDKQINNTIKSAYYHLRRIAKIRRHLDRSSCTQAVVAFVSSRLDYHNGLLAGITQKNINRLQKVQNHAARLVSQTAHHCHITPVLADLHWLPIRARIDFKLMLNAHKAVHCNDAPKYMKELCMKYTPSRTLRSSSDPHLLAVKKSKRNIGASTFDVYSCKTWNELPRDVRDIEETICFKKTLKTHLYKRCF

SEQ ID NO: 2856 - protein, 1053 aa, synthetic construct
  source 1..1053: note = Description of Artificial Sequence: Synthetic polypeptide
MACEWDGKNSLLKLGSENQPSVSDVSISAMQAPPVAQSPVVSTARLSTLALPYAQVILNVPTAKASTRHPASPVHPTSKPKKENMDSHNIWITNIRGLVSNFDSFRLEIEHAHPYLVIVTETFLSPDVPDQALLIPGYSFLRRDRRTHGGGVALYYRSSLRLRRLTSLETQDHEVIWFQASTREHDIIGCAAYWPPGSDLDITQHLQHALDEVSIEFNTIVLLAGDLNAHHPDLSESISTNTAGRLLQRFATVNALTQVIQAPTRVTAHSSSCLDILLTNIPEEINFLGVYPGIGTSDHGVACVDLKTTSVITHTEDSATIRPRLHFNTHSTNWKTVNDHFSNINWHHRFAACNVEETWTLFKDAYEEVLGRLSKKSRPTSRRTNHERHQHNTLNQELIRLRATQQAAWRLHSTARTRETHQSLVTARQEFTLACANHIRRTDEATVKRMTESSNAKQWHKYCKQLYRGSAVKEAIPIMTVGTESYITAKDKATILNQTFIAKSRASSRPRFPSLKKRTDSTLADILFNEYRVKKILQDLNINKASGPDGIQPSTLKNCSDSLHVPLAILFTKSFTEGVVPTEWKLAAVVPVYKNKGQRTDPNQYRPISLTSCVGKVMEKIINDALLQHLMGNELIVDNQFGFLPHHSTTDQIALLLHELLAATTTKKSVVACFLDLAAAFDSVPHPAILQKLPAYGVRGRLFRWIESYLSFRTQYVVVDQSSSPIAQVSSGVPQGSVIAPTLFLLFINDLCHSLSANTSLSHPDCHPEALVYADDTMLYRTGKDPALICPAIEEDLRIAAKWADIWGMRFNASKTVAMYISRTTATPPPITFAGATLEYSHEHRHLGFILDSALSFHAHVNALTRKGATEVFLLRRLSYKVKDRDLLLKIYKMYVRPHLEYASPAWAALTVTQTGLLESLQRRAMRIILALPRNHHITDADYAALNITSLRHRRNFALACFMFKLNSNRLPRKLSKYRPIPHTNPYNTRNCVLRAPYVPYPCLRLLDRSPFLFGLKILNFISHTFHSLPDISSFKSSLRESSYYMPLAQIYY

SEQ ID NO: 2857 - protein, 650 aa, synthetic construct
  source 1..650: note = Description of Artificial Sequence: Synthetic polypeptide
MKNSIKMKNKLYCKYLKTKNPNDQKQYKSYKITLRSILYKAERTHYDQLFCRNKNNLRKSWEVIKTVIHKQKNNNKQQYNMEVNGKKTSDLDIITKHFNEYFINVGPNLSKSIPYSNIDPISYITQTNRYSMFTKPTNETEIGNIIRALKNSAPGPDGIPSSILKENTAHFIQPLTHILNLSLSQGIVPNEMKIAEIKPLFKSGNKHLVNNYRPISLLPAFSKIFEKCMASRLIEFITKHNLLYQYQFGFREKHSTNMALHLLIDKITNAFDQNKVLVGVALDFRKAFDTIDPSILISKLEKYGIRGCTLDWFRDYLHNRKQYVHLEGIKSSPLSIKCGVPQGSILGPLLFLLYINDLPQSSQLLPIIFADDTNVFYSGDDSEECIGIINQEMINLIKWIRSNKLSLNVEKTQYIVFSKRKIAPDNNDVNINGERLNRVDSFKFLGVIIDDRLSWKQHIAYIKTKVSKSIGILRQARPVLNKTTLLTVYYSFIYPYLNYCIDVWGHCSKQDLQSLFIVQKRAIRIINYAERNAHTDQLFKSLEILPLHHLYIFSVIIFMHKFHHKRLPPVIDELFQTNASIHSINTRQRHQLHTPLLHTNISMKSIRYRGAFIWNQTFNEIDTNLTINRFKTCLKNKLFTDFPIRTSPIQ

SEQ ID NO: 2858 - protein, 882 aa, synthetic construct
  source 1..882: note = Description of Artificial Sequence: Synthetic polypeptide
  VARIANT 22: note = Any amino acid
MVPDVNPSFSIRAEDCRYIAPXEIPNLCEHYTHPLRILHVNIRSLRANYDELLNLIASYEESNRALHVLLLCETALSDANTVLFGIPGFDAVYANRKSHQRGGVAIYVRKGLNFTQRPDLSIFSEGKFETIFIELSLCQNSQPIIIGEIYRVPSLNAPETIAFFDSFTSLLHRSNASIIFGTDQNLDLGKIDEHALTRNVYNLLESEGFLPTVNVPTRIEGVTKTIIDNIYIRGSLPSARTSVVEVKIADHLPIVLTVDFHMHRKKNSPLVIMHRKMDETIAQRIVDELGQCDWQSNENRDIDSAFEFFLSEMTRVLDRHAPAKQIKIPSKSFRREPWFTKGLQRSSRRLSKLYSTAAKCAKNSHQHTAYVKYRNVYNSAKRAAKQLYYDNLFSESKNDIKRTWKILNDLTKKSGKDNSPVEKLQVDDVTITEPKAIADAFARFFADVGPKQAGLIASHVQTDDQQNRAHLGVPPSHHSVFLHPVTQQEIIRIVDSLKNKKSLGLDLVSTHFVKKLKHALSAPLSALVNKSFCEGAFPNLLKRAKTIPIYKKGERFNMDNYRPISLLPIFGKIFEKAYCNRLMPFLEDRGFLCDSQYGFRRKRNTTYAVSELYLNSINALLKNEITLATFIDFSKAFDTISHEILLNKMPSYGIRGRALDWIRSYLSNRSMKVSIQGCLSEEVQLSQYGVPQGSILGPILFIIYANDLNACLTHTKAIFYADDTTLFLSGKSANVLAERMNDDLGRAKRWCEANSLAVNIKKTKYMLIGPNALTRCTIDLSMANEKIERVTTFKFLGITIDERLTWKAHIESLSKKLSSGLYALRNTKRLTSRHGLLSLYHSLIHSHLTYGCLLWGSASDNALKPLKIAQKKAIRLVYDAIV

SEQ ID NO: 2859 - protein, 2548 aa, synthetic construct
  source 1..2548: note = Description of Artificial Sequence: Synthetic polypeptide
KLGPTPAALAQDPPTNPTGGPPAGPNTTNSPSPPTSANPGPAARSNTATRIVPKPAGPTKRPARRTPNPTPKLRKLATGTPSAPPPAKRLHQTTIATSHKRRHTATLQNTPTEPTNGQAQASPSPPPDGRISILTLNTRELLSHHESILHTVTTHTPDILFLTETKIPTRLHYSMGSAKKGLSSHYQTYTSNAPYNPREGTRPHAGVMVGVTHRFSRPSGTTDMNAHNTDSRLAGHVCHIRIAPPHSTPVHAIGIYAPSDDATRAAIYKYCTDQAAKTTAAKEHLLIGGDWNAVLFPSDRSTGQLNATDRAHIAFTTSAGLHPLTPPTHEHPRPHTYLQDQATAPHMSRIDDLLVSHHTHATITTTGGGQEAVHECGDALDHRALLSSVPLAALRLYPFPTAPAAPSDPDAWVNYHPPTKDQREKARIKMEETIGQEIADLLNTLHPAHLAITNKLYPAGLTPAQAERNTPSPAEFRALPEVSAADTTSISNTLESILQKCLDVLKSYCDKKPPRASTTSPRHHTSKTVTRLLTATSKLKERLTAALTVTNAAGATPPTTSPHPAPTPPPNTTSPTPTPPTPAEADTPTAIRSQLLNARTLLRAAKKEARKLNTKRAARAFRRLVATQPKRAHQKIFDETDQPRGTPALTDPTTKEVHTAPEKILSSIHQHFTAQLLPINGPRTGHYDIPHSEKQYPWSRPDAPDRMPALSKPTDAPATLLPGIADSTTFFGCVNHLSRRKAPGPDGIPNELLQTIPTSLQTAIHQLMTLMWVKAHIPTHWTQSDTVLLPKKGDPLLIQNKRPIALANTLYKLYTSLITVNAALFSEQAHIFTESQEGFLRGRNTERQVQNLLHAIEDAATTGRDLFLLYIDFTSAFNTIDHDKLLIVMHDLGYPTDLIEVVRDLYGKAATSVRTEHGTTPPIPIQRGTVQGDVLSPLLFIIFIEPLLRWLHVGGRGYQYGCLTKAENDKHNLSSGAFADDLVTATTQISNLRIQVEKIEKYAAWGGLKVNVSKCQLQGILHGRARADPTLGGPRSKPHQAALARMLEGQIRIDGTAIPYKPPHESYKYLGIHITPTLDWSAQVQYIREKIKKRGQRIATSLATPDQKLRMIQLTIHPAVAYSLPFMPYSTHDVTSLDSLIASTAKMCYGLKRGFPTRAILQPTNALGLGVGSIRELYVRRAGKALVQALNDGGRLGAVTRAMLHLQHSVAQKIPADQLRTQCRFYTSLRQLSLITDAGLELTQQGSAYHTTLHGLSALLARTVPPGADAEQALPFRLIQPLLELTSDFRELLTPDRTCVIDANTLKNTWPRAQRRHRLALNRLTLALHAETRTRAKTHNSTAPLTTAQRTLPDGHTFTGLHTAHTAPAAVDWGTLNRFLRQRAPATGQTANAGETAAATTAAATTAAAEPEEDHHAGENHAPAQTRRPGTQQRKRACIKMVREPEGRGSPPADAPAAFDWDPSLDPLTEAHCADLIHTAPSLLGKSKPQNPAAHLRGLLLGPTPPATFTHRHKLSQEEQDAYLAATSDTWKHFSETYRTKALTTTNTLYGQQERVQQVIAHTTSKGAPFYRVQWEPTVITPGSLTLYARNRYRPKPGGLTWLLTPGNEPRVLVEWEDLEEPAAILDAQDNKQELLDALNARLAVPLGPRPPPPATDTHLSHDQRQGRWTDASNDTARGQRTLRHYVDINVEPCNPSRDIHPTQAYTVQLGTVLDPGSPACGTHLAHVYDPRGRCIGTISAEQLSLLWQRYQHAQTTWPKVHAKHDQGRGFAAAIARLLLRYKPGGGSKSHPVTEKGECMLCEGLTQTLHTAIGSTTELFASPLNVSDAATTYYTLYEEDMLFGANYDAYSQPWDGVAVACPEPNTEDGAHAVRWALAWAEHTETLTNTRNPPTTATLLILPTQRNAPYTRYLAHPRVTLLGSISATTTHALLGQIHNDTGITLKHDLVLVSNTPGAQLAQPIRDALGTSLYLSGMPVDPQPQLTWAHTRWVTKQVRRMTRTRPAAPRVTPPPVPATPATLAPFAATQPLRLNPYEGFYTDGSVQKDALGQPSAWGAAAIDARTLRCYQIDVNPGQHGCNTITRCELSAIHQVLKLDEVQALPEVTVYTDSAASLFLIRKTINQPQLLTFSKHKALLDNILALLKRRSHAGRRTNLLKVKAHSGIAHNELADQAAVKTAKGEQIPGAEWLVEESDNDPRSKYYWIRKIIKPTVEGVPREKNEGHYAHDLNRGIATLAAPHIAQGHTRETLYTGFVANAIPDLDIKSSTRTMNLQSGRHRKAKRCMDYLYGQLWNNKLAARFGRTVTGRRAPRAGPDTPAPCPLCRGPDSGGHILGGCHNPQLRAMYIKRHNIAVQTIARAISRGDCGGCYMVMDATSKADLPDYAADNRLPPWLLPDQEGKPAGRHLHYRPDILLIPSISLAAALNPDFVVLPSEHDTIHIIEAGYTADTNHAAKQHEKAQQHQALAADLREAGWKVQYTPQSAISLGFAGTIRKDLHPLLTSLGVTSHKARQCCDTLHDHAVATLNHIVLTRRRLERGLPPGDPGGT

SEQ ID NO: 2860 - protein, 1484 aa, synthetic construct
  source 1..1484: note = Description of Artificial Sequence: Synthetic polypeptide
QWGWWRRRWRRHAAGGGGRPCRCAPRPRPHRGDLGCPAGGSAVVRRPRQQAAGPRPLRVGSHNVRGLRSRVQHLGCPRLHALLRCWERQQLDVVCLQETHVRAEDIDLVTADLRAAALRLHVREWTAWWAPAPTPHQRVSGGTAILIRTCLLEQGAVTFPGGVAAPSVADGAWVGRGVSLPVQWGGHDFTLAAAYYPLASPEQRAFTQQWVASAVGGEGNHLLAADFNFVSDVALDTASGVPRPGDPAAATALAAACPGLIDVLRVRRPGQRVCTYIHSHGASRLDRILCSGSLVAQVLACAVEAGVPSDHRLVTLTLAATPEALPPSPGLPKARLGFLDFKDLTKDYRTWLTAALGARPGAPAELLAWWPQLKRAAAASAARLSRVAAVRRIAASEEEARALAAAAAAAAAVEVGAALPEAAAAAVRARCAAATAAVQAAAGAARRTRHEWLRGGEKPCPVLTRMLRPSGGPRTIARLKRPDGSATSDPTVMGQVMATYWQDVCAAPPPAPAARAQVLAALQQHGRRCTTEEAAQLGQLAVTAAEVRAALAAAPAGRAAGPDGIPVELYQYYESDFSPVLADVFTAVGEGAGVPGGFLDGVWTFFYKAGDPLEPSNYRPITLTDTDYRTLARVLCRRLQPVFGRVIDPEQTAFLSDRRIADNVLLLQLTPGLLKAAGQNSGVAAFLDFYKAYDTVDRSFLLACLERMGVGAGFLTWVSRLLTDTRGAALVNGRVSGWVPLAAGVRQGCPLAPLLYLAIAQALLSWLRSKGHGVLAGLASALASQYADDCTPFLAGMQAVPGFLADMDVFRCASGQRLNMSKVELLVLGTSAGLGVAPAAVAGPPLPPGWRVVNTAKSLGVHFGDWKTATPPVAFDGVVGVLGLIVRMPVSMFGRAAAASAYALSKVLYHLEFAGFPSPWAPVGKLLGQVAAVVDRRLSPAKYAVAPHARPVGVSLDIMQVPPALGGVGLLPLQLHVQARQAGLAVRCVLGACGLLAFVPPWTKVAEAWLRARHPAATPLRLLVRCDPSRVLDKLVTPECKPFLRLLGAVAHLPPITLVAPPAAGDWVYHVPLWANPALCDGAQTFDVAFADLFALPGLVYVGQLVAAHDQLEAVRAAHTRPGGWGTRFGEAMLDLYLTSVWRPVLGWGPRRHLPSPLLGPASPLAAAERIAAAVALLPGGWEAAARAARLARGRAWVMPLPADAVRQAAAGALTQVVRGLGWVLDGGPPLLLLNYSVKAGTAMQLGPQVAALRSKHLLYVRDAGVSADGALAAAGAFAGTLARLWALKWENYHKEALWRVAANACWSFPKNAAQRAAGVAMPLCRACGRDMCDGDRRHYFWDCVVARALRENMAMAMLGSPPDTADDCFSRADLWLVQPPAGLAPPVWDVVCLAALSALDSGRQQVIMTGLRVRRALTSAEVMRISVSVIADFWGRLQSYVSLGLRPKAWATVPAHHPFLSRGAGDCVLLVLPDDVGSPPPSP

SEQ ID NO: 2861 - protein, 3134 aa, synthetic construct
  source 1..3134: note = Description of Artificial Sequence: Synthetic polypeptide
MSSNPMTLQIGTQPGQQQPDLTSPSHPLRGGNNTERTTTPAAENGHIPVPLSWPRQIPSTYFREQQHLNFCTIHAINNMLGAPWLRAHAVLAFCQVVHTALADTPELQATWGHHFKHNGLFHEAAINHYLRHRPAPIDTTGTRLLLRLAAPNLDPGHSQDTILGLLPECSRNMGFMVHDGRHAYAIRKEEDSWFLVESFVHIGRKPMTPDLWQAVKGDIFCLHPYHLDMPLDPRTYPTIPNLPPPPQPPSPPPPNQTKPKRGPTQRALSTMFARQTTQLPTNHSAGDNAAPTPHPGPAETTVTRPLTQATLNITRREATEPARTQNERPATPNSAARPTRRPRHDNQLDPEPTSPTRANTTTRPRANANMHAPNTNPTQPTANNTTQPTWAQVVATHAEAAGNALRTVGRITTQAPHQRPETPPSAARPTQRPRADPPDSPTTHQTVNPNTPRRTPPGPTPDPGAGAQDNTETRPDNTTWLHIATHNVRGLGTNLLSTICHLREWNADIVILTETKLGPRTRWLKDTLRQEKLSYRTFTSTKPGTEQYKRRSAGVLMAISKRYHSGSNVHTATIPPHLHGYIVHCTIRTPHSTPLHILGVYAPEDMPTRRRIYKYCEETINTANKTDAHVIIGGDFNAVLNEGDRTGPPDEADKHHARFVSKNKLKRLPEFGGTISMSFYQTRDGTPQPTSRIDDILICQNIHSALPTASRTPATLQVQPCGGLFDHYSLHARVPTFPIRLWPSHTATQADTQPPETPGPWRTVVLPIPKSTLEAARTKIEHTLANPIATLASAIQPATTAIQQHLAQHTAGATNASELQHALQTDPAIQTPDLDALANQLLEILQDGLSILVDMCPKKPPTRGVFAPRKINKRIRESHNEIKQLRTQCDALLQQQHPYANITTTTAPNTGIPLPDPTTEQDAENPPPQQPPPAHDATTTAEPQRRPRPPPATPAIANLIDKIKRAGDTLRQILKKQTQHDIQKARDRFQHKLATRAKQAHKDIFSTQEQSRGIPALIHPQNKAHCTDKASILDAIHAYFQGQGASITGPRSGKYKPEDRTQVYPFDPSLKNSAPDTFTLHSATTPPTHALLPSIADSTNFDSCIDHLSRNKSPGPDGIPNELLRALPQTLRTTLHNLLTLMWVRAHTPASWTASETVLLPKPGDPLLLKNYRPIALANTTYKLWTSLITVAISDISHDLDLFSETQEGFLRYRNTERQTLNLVHALEDAGLTKQDIYVMYADFSSAFNTISHDRLLEIMWDLGMPHDLIRVVQNLYSNARTYIRSEHGLTAPIYIERGTVQGDTLSPVLFLVFIEPLIRWLHVGGRGYSYGCLPPHLNARYNCSSAAYADDLAVLTNTLSDLRIQCDKIHRYSEWAGLQVNHAKCRVTGILHRRAMQDKGLNGPTCNRTLRSMLENKIHIGTTSIPYLPATEPFKYLGVQVTMTLNWGPQFAYLCKNITDKSLSLQTCQASPEQCLRIIKSCIQSVAAYSFAVMPYTENDIRTLDNMIARLARTCYRLSRGFPTRAVLTPAEMSGLGVGSLLPIYVQKATRALTLALNDPGRLGMVTHALLELQTRIAGTTDMHKLRHESHYYTTLKQLSIMRAYNLTLWDHGAPYKGPPNTLLTAISRSPHPISHHLVLTLTQAGLDLRNLVGKERTPEGRACLIPSDILFQHLPRNQCQHKHRVALNRLSLCLSAECDGAREAPFNQAESYKCHLPLPQRYRALPNTPAFAALLPRNATPGELTTQSTMDAHLQHMTALHPNTEAQTPQHPNGLGPRQRQTTLAHMLRTTGAPPTAPTQSPTATLTQTPTGTLPTPPLAQPMPPPLTQPTPPLTTPAGPDAPNTQTPPTVASLTTAHQQPKSKKQRPNAIKRLQQKIDADPRHDPLPPTDMRSHTEKSGFILNNDPDENDSGPPNFVMWAPHYFANVQKDMQGTNRMPRLGIPRHHSRFPQNRTRPNPTRTIPAHLADPYFLGSQVDDTNPLNPVTAYISANPPTTPPTCAYDSRPRWADTGDFMIAPEPPNWPNITGATPGDSHDPRQADHDPQGQMRAEYMQERERLRAHLDDHPPQPRPFKRWMGIRLQLLTGKLPWPTQAYHVAQAAKQLVYSLYHDIEEISHIQAGPITKAVTAPEKGASLHTERYYEVAWKDTTIVKGAAEAYTRMKYTGTAAAHMGYGQACHKYFLRMKWDPTSEPVDKCPTLQGWTPAISEHLRKLAEPPTPTPQPKPKDARLTPAQQQGRWTQADVAASHVRRTTKQNTRIDTNPCNPYLDVHPTGRYTIQIPDTYTDERTLAHVYNPTGRHIASVTLGTLLTLKARYEHALSTHHDATSPHRSQGGFPEDLAKLLLRTRVDSKGKTCKSAPARERSLPESLKLALYNCLASTHSDPDRPVGLVERFASPLNCSGRATKYYSQHAADSLFGASHDAYTAPFDGLSLAHPDPDPDACTKALAWATASIEHLEHQATPAITFMIIPQGKGAASRCLASPHVTILALIPPGVSASSMLDGLGAADEAASSKQGLQLLLIANTTGVQALNSNNNLTRLQTSLAELGAVPPPTSQPPGRRQPLEWPARVTLPRDRTAPPGRPYSHRAKARAKQLTRPQAPAARGLDTCPTPMPTLSALYTTRAAFPTRSSYLYDAATIVWTDGSCIKVAAGEDGNEMNKLGACAWSQQTEHIYVEPGGLNSTNTIQRAELSAILVALEYIRPRLCLLGMTQVTIASDSLVSLYLIRRALTAPQRLLLSKHKNLLENILHELQMYADAGVPVQLLKVRSHTGLHGNEEADKGAAKVAANDMEAMGQAIRLAPDEPWSNIWWPKRNSDNFYLSDLNRGVLNSLPPEAQQGFTNNTPVLEQWAEASANMCPTLSNRTLASSTRHPWLVKQILYARYGYLFNAQLKRRYRLGGNGNCPLCHTPDSGGHILGGCTHPKMKGAYINRHNWAVQRVAKCISKGTYGNGFMVMDAGPLADLPHYASAQRPPAWLAAERTSSPLITRLRPDILFIPNLPAHETHREGYRPPLNKARLPIYILEIGYSSDVRHLDKREEKSQQHQELKRLLEAAGWTVHYSTNECLALGVTGAIPCNLTKLLTSQLGVTHTAARVCGERLHTHAVNSAGGIIKMRRVTEQELKPRGG

SEQ ID NO: 2862 - protein, 719 aa, synthetic construct
  source 1..719: note = Description of Artificial Sequence: Synthetic polypeptide
  VARIANT 7: note = Any amino acid
  VARIANT 14: note = Any amino acid
RFFEAEXFLSDLYXNFCNLLSHKPPEYSGDCLLQNFFSVFSEIVDKHAPLRSISRKKRRLLSKPWITKGLLQSIKNKNSMFSSIVKNKPNLQKYSVFKVYRNKLNHLLEISKQMYYKHEFSRSKNDIGRSWKLIRELIQIKSPTMTISKSVGITASDVTSDPINVANKFNDFFVDIGKNLASKIKPPTNHVPLKPFRKSSSFFISPSTPDEVFSLINCLDVKKGTRHEDIPTKFIKLANSIISPILSEIFNTCVKQGIYPDFLKNAEVIPIFKNGSDNLCTNYRPISLLSQFSKIFEKLLYNRLIKYLDKHKLLSNHQYGFRENCSTTLAVADITNMLLSNTDKGLYSCGIFIDLSKAFDTVDHSKLLAKLEHCYGIRGVALDLFKNYLTNRSQYTFVHNVRSSIKPVLCGVPQGSTLGPLLFLMYINDLPLVSNFVTKLFADDTFLCMSSKCPYELQAKVNLELIAIDDWLRSNKLSLNYSKTSYVLFTGNLKPIGINDFHLNINNNKIIRSQSAKYLGVLLDEKLNWNCHILNLSQKLARYCGIMFKLRKYVDIKTLLNIYYSLVYSQIQYAIVCWGASNKKTLYPLNVIHNKIIRAMSYSPARCHVTPLFSDLKILKLCDIYKLEMGKLMYKFHNKTLPDSFNYIFQPLYCAHNHITRQVAHHDYFVPYFHTLLGQNSIGYRGPVAWTAIDVSLKKLGWFSFKKQLKNQYLLTYIT

SEQ ID NO: 2863 - protein, 31 aa, Gammaretrovirus sp.
HIHGEIYRRRGLLTSEGREIKNKSEILALLK

SEQ ID NO: 2864 - protein, 801 aa, synthetic construct
  source 1..801: note = Description of Artificial Sequence: Synthetic polypeptide
MAQRRFLLKCRYARVFPNHIKHLYNKCSSVNFRCKPIHADFNKSTLHFCQKLLNFEISDINTHIRFLQNSISRLKDHIASLKLDYNIRERHYKFVNIKQNTIYRRSNHTLHKKFKKILPKTNTTTSNNDSIHNLTNIAIPKDVAEIASLGPNFNLPSTFRERDFLCIIKNLEVGLSHLDTNDRVKTEIRDKVSQYLVNACKQKPAISRKDRQYAKNLKSTKNFLNKNPDIFFTSADKGNVTVCLKKSDYTERMHNLLSDKSTYKIISKNPLNSLQKRTSNILKNLNSNGFLSRTYHPNALSLTDTTLAKCYGLPKIHKVDAPLRPIVSLINSPTYFLAKVIYDELKKSVNVPISHINNSFELKNKLKNIKPTTNYRLMSLDVSSLFTNIPLELVLRSIDRRIVTIMNKCRIPVDEIRQCTEFLFNNTFFTFDNIFYQQIFGTPMGSPISPLFADLVMDDLENDCLSILKNNYNIIPSFYFRYVDDVLLFINVDHIDQILNIFNSYHPKLQFTYEMEIDKKLNFLDLTIIRNSNYFNFDWFEKPTSSGRILNYFSGHPVSYKRNIVFNLVDRAILLASTRFHGVNIARVKNLLIKNNYPFNFINKNIKVRLKRHKYSNHNRSTTNTYPLCKIGIPYIDNNFEKISTMLKPYNIHTYPLINNKLQHIVRLGKDTTNKHKQTNVVYKFYCKNCPASYVGETKRAAEVRISEHMKSKNSDSVVCAHQINFDHEFDWDNFKILDKESNYKKRIISEMLYIKLDKHNINRKEDVLSFNRAYLPLLRKFKCPDRVHRPLPSTFAAPPI

SEQ ID NO: 2865 - protein, 403 aa, synthetic construct
  source 1..403: note = Description of Artificial Sequence: Synthetic polypeptide
LFNNICFDAVKMAIEKFWHHIHNKINLSLTDFLNVIEFIMNNNYFQFNNNFYLQRRGSAMGSPISPVLADIVMRDLETACLNLCPFNIPVYFRYVDDILLCVPVDKVEYVLNVFNSYSHFLNFTIEKSENNTINFLDMTIVANNDSSISTNWFRKDTHSGSYLNFYSHCPISQKKAIVSHLVDKNYKLSSPEYFSNNFKYIYTVLLANNYPLDFIESCIKKRLYFLKSINNSQNNISPVNNAIGSLVIPYCRELDYKLRVFCSKSFINVIFKSSNKLPFNRMYGKDILKKLNNPNVVYKIDCSDCSNCYIGQTLRKLSIRLNEHKSDIKHKREKSALYQHHLDTGHSFNFSDNEINIIDIEQNYYKRLLSEMIFIEKTNNFNRMLDCDNLNKVFKRYIHLLLK

SEQ ID NO: 2866 - protein, 752 aa, synthetic construct
  source 1..752: note = Description of Artificial Sequence: Synthetic polypeptide
SDINIYKNYLQKELDKIEKSLIFTLGIRFFELFERFFHYKSKIGIKTFDDILTNKFKILYFRKYKHTYEKKININNNSIRVSKTNSNIKSKWLHNLTTINLPKEVQFCINLGKNFNFFDFENQNETKRVYLELFKSLNKPLHKNQSISNNIKFKILDLVKTHIKNNNKSSLDILISNMLNNCNKFLKNNKNIMITKSDKGGAFVIIDKQDYINKVEESLNDKKLYEVVEHNPLPSLINKTSNLLNELNGSDLFGDSGNKKVFNTIRDKCILAKCYGLVKVHKPNQPMRLIISNIGSPTYFLSKWVSEFLKNNLPPSPHNVKNSFELKNDIKNFLIPDGFCIVSFDVVALFNNIHFESVKVALESVWHILNLKINLEFFSFLNIIRFIMENNYFSFNNKNYRQKFGSAMGSPCSPSLADIVMRHIIKMLLFLGPFEIKLIKVYVDDLLACIKISESDKVLNYLNSIDKHIQFTMETPNNNSINYLDMTLTWDNNGSIKTNWFQKPTHANLHLNYWSHSPLSQKIGVIYSLVDRAIKLSDTCYHNNNLKKVYEILKENNYPPDFIKKHAERRKKIIYYNNKNDNNNNSNKKLNDDNKNYIVLPYIKNCDSNFKSLLNKVSYKTIFKSVNKQKFLNQLGKDSIKNKDKVCSVYCIKCKNCDKCYVGQSSRVVSKRINEHKRDVKSKKNESAIFNHVQDNGHSFDFDNFKVIDNEPNFYKRLISEMVFIKKYNTVNKVTDTQSLSSVFEFYINKYL

SEQ ID NO: 2867 - protein, 646 aa, synthetic construct
  source 1..646: note = Description of Artificial Sequence: Synthetic polypeptide
  VARIANT 596: note = Any amino acid
LLKPLEAALAVNKKIEVDTSKKIRQTYLQVIKKNIFNSKKISYFDKTINNHLNETKMFLKEHREILVTRADKGGATVVINKTDYINKVERALGDSMYYHRLDSQKRANHLTRIINSTKKLVDVWDNRGVFDTVEIDRPDVNQLSGCNLAKAYGLIKVHKPGLPVRIIVSAIGSPTYTLDKWFSKFFNKFCKRSPSSLKNSYDLKSTLRDLIVPHNYLLVSFDVVSLYSNLPFSLIKKSVEEKIGRTLDSMHLDRKEFLDGLDFLINSNYFTFNNHTYKQTCGTPMGGCTSPWIAEIVLESLEKSVLPRCRDSCLMYRRYVDDCLLIIQSDSVDTVLGIFNDFNPFIQFTVEREDNGVIPFLDVTITRIADSVCEIDLYSKPSSSGRLLNFFSHNPVSQKIAIVFSLIDKCFKLADPKFRSRNIDRARRALTMNGYPTYFIEKYIKARISIINRFNKNKNHINSLTNCEMSPPVMEGSSRLSFIILPFYPRLEKTLRSFFSKHKLKTIFQNSNKFTNIIRLGKDQTPKLKRSGIVYRIECECGLFYVGQSKRRLATRIDEHKRMVHKCDKNSVIAAHCSEFSHTFKFDEVKILDQEXNKFKREFSEMLYISYFNRNVNRKLDTNKLHDHYKSFLYELRDRMHGWRCS

SEQ ID NO: 2868 - protein, 671 aa, synthetic construct
  source 1..671: note = Description of Artificial Sequence: Synthetic polypeptide
  VARIANT 569: note = Any amino acid
  VARIANT 574: note = Any amino acid
MDNPTYSPNETLNRNFLFDEINRLVFKTKSKSASGYDEIPYGVLKSQKVIETLTRLFQLILDTSIVPSVWRKAIICPILKDASTDPRIPMNYRGVSLLSCISKIYSAFINQRITSHLDAHEYLMSKTVSEKTGRVKTRIHLNSVIRIKITIRSFHDLRKCFDFIDREMMLYKLLVHDIDGKVYNSVKSIYQNSESCVRWQSVQLCEKYLPKLRIVCALNGQLTNSCNTGVKQGDNRSPTLFSIFINDLVQDINELGLGVDVGEKKLSLLLYADDIAMIAKSKAELQRMLDKLHQWCKRWRVLINTNKYKCVHFRKGKIKRSNCNFTIGSNALETVDHYKYLGVTFNYNSCFNSNAELLAKLLAKSGGRALGQIIAKIHNNKYFGFTSYEKLFSSCVAPILDYGAGVWGYRKFQAIDNIQNRAIRYFLGVHRFTPILFLYGDVGWLPSQFRRWFCMLRYWNKLICFEDDRITKMAFNLDYERCRDNWCSEVKHIMNQIGIGQYYDTKCAIDLGLVESHLTNFYSEIWKDSLENVPKLRTYKTFKTDFGLENYISFNLSKAERSHMAQLRXGILHXRDPPLRIESGRYVGEPPNERLCTLCTQQVIENELHFVLDCPFYNQYRTEILGEQLLSPALLNRDRQYVFTYLMSHKFRQLSKFVVKAFRIRRQFLYR

SEQ ID NO: 2869 - protein, 1137 aa, synthetic construct
  source 1..1137: note = Description of Artificial Sequence: Synthetic polypeptide
MGNSLEQYRAAIGNFYFSCRCVCRSVLVNFFGFSFFSKIFMFPSIGLFALAMKHLSRHIVVYNFYLQFFMFLLLLCGDIEVNPGPIMTNVLDILHLNIRSIRNKVANLNTIVHDFDILCFTETHLDRNVTNESLMLDGFNTIYRKDRNCFGGGIMIYLSDLLRAIRRPEFETTCNESIWIEIESHTCSYFLCCVYRPPNSDGNFWTSLSWSIEKVGEITDNIIIIGDLNVDLLSIPQTHVIHDIMSNGNFVNNINEPTRVTNTSSTLIDLVLSTPAVKVHESGVLNIDSSVSDHKAIYISFSIDIELNRAYERNIWVYKDADFEKLNSLISNCDWDITINSAPNIDAAVAQFTSTFMAYVRECVPEKTITIRPRDKPWYDSMLRKTMRIRDRLRNKALRTNNDADWTKFRHVRNKVNNMKKHAITNYYDNIESALHDSSRNGKIYWKLMKDLFKVKATTEIPPLQFFENGQPTLAFSDIEKTETLNKYFSSISNIESANRSLPNLYYMCNNFFSDIHIEVQEVFDIISILPVNKAIGPDNISHRMLKYTKFSISKPLCMLFNKSLVENSFPNYWKIAHVLPLFKKDDPSVASNYRPVSLLSCVSKIMERIIFKHVYNFFHENNLFYKYQAGFLPGHSTVFQLLETYHSIVKSIEDGKMCCMIFCDLSKAFDRVWHEALIFKLQTYGISGHLLQWFKSYLSDRTQRVMYKNKLSSTLCINAGVPQGSVLGPLLFLIYINDVATNMLSFCRLYADDNSLQHCDLYTKNIEIVLNHDLKILSDWSDKWLLKFNPSKTKAVFFTKKHVEEFPKLFFQGCQLDYVSTHRHLGLLFSNDLSWSQYINNIVNSAYKKLGLLKKLKFTLGRTNLSKMYITFIRPVLEYASVVWDGCNMFDMERLEKVQLSAARIVTGLPILASTDSLYTETGWESLVSRRNKAKLITMFKIHTNQVPEYLSNIIPPVTKNVSIYHTRNSENYSVPISRLELYKKSFVPDTIRKWNSLKLEVREATSLNIFKKNITESIPQPPKYFSFGKRTINILHTKLRHNCILNYDLYRRNIIESPNCICGQKEDVYHFFFVCKNYVNARNNLFELLFNRLDETILINSHLLLWGSDNLSYNTNCFIFSAVQKFINESGRFNN

SEQ ID NO: 2870 - protein, 1053 aa, synthetic construct
  source 1..1053: note = Description of Artificial Sequence: Synthetic polypeptide
  VARIANT 14: note = Any amino acid
  VARIANT 31: note = Any amino acid
  VARIANT 43: note = Any amino acid
  VARIANT 48: note = Any amino acid
  VARIANT 69: note = Any amino acid
  VARIANT 70: note = Any amino acid
  VARIANT 75: note = Any amino acid
  VARIANT 86: note = Any amino acid
  VARIANT 442: note = Any amino acid
TYFCSRMLYTPESXVFYKKGKVDIFDCLEEXYCSFHRKGHIYXVGDFXARCGTLDDFISDDKLGKSVEXXLQSFXDYDNNANVYCXHNADRGVNNFGKKLINLCRTTGLKIVNGRNENDYNGNITFYNANGTSTIDYLLTDVYNFDNIAYFSTGIFNCFSDHAPVSFCIKTNYIDGGSKALCCANTSQGNGSINQCTSVRWKEGADLEATWSISEHYDLFLSYVENQLYTQEDVDNCVANFSKTLCKIMKPYCIITGGLANTVIDAERCIDKPWFNDICKSKYRDYRGALHNFNVCKSDVNRIVLCAKKKVYKKNSPEVIELYFVQRKRFIKKTVQKFKHNYERYQGDRMEYLRKCNPKQFFRLFKNNKKISCDVSAKEFFEHFKNLFENVKTTTYDNTSDDYEILPCYEELDVCISELEVEKAILKLKSNKSNAEDGVINXFFSKCKEVMIPILCRLFNNIFDSGFYPDNWSKGCIVPIFKKGEMQDLNNYRGITLVSCLAKLFTSIINTRLLEWDQRYNIITDAQFGFKPGVGTIDAIFVLQNLISRTLKNKKRLYCCFVDYTKAFDLIDRSKLWYKLQMEGFGGKLLRIIKSLYKNVRACVKHKGTFTETFRISAGVLQGEILSPLLFSMYLNDFERYFINSNCTSIELQMINMFLIMYADDTVLLAESPEGLQDMLNTLHRYTDEWNLSVNVQKTKIVIFRNGKCVKDNEKWEYNSKYVEVVNQFNYLGMLFNYNGKFLSTQKHCAAQGNKAMFSISSKMKDLNFNVETQLNVFDTYVKSVLSYGAEIWGFHKGQDVEKVHINFCKKVLGVRKNTCNSAVYYEVGRFPLEIFRKQKIFKYWFKLRNSKNCILKACYEDMVKNNDIWISNIRKELSILGLADLYQSTMKESVILDIIFNRMCDVFKQKVVNDISNASKCILYKHVVDHFCLQVYLKKPIHVKYRKLITRLRLSSHDLKIETGRYDNLTRDCRKCESCNLNVIEDEFHFLLICPSLCSLRDKYIKKYYSRKPSVYKVIQLLSTSNTKELCNLGKYLYYANKQRTLHVNYPN

SEQ ID NO: 2871 - protein, 531 aa, synthetic construct
  source 1..531: note = Description of Artificial Sequence: Synthetic polypeptide
  VARIANT 89: note = Any amino acid
  VARIANT 298: note = Any amino acid
SHPERIVFKHLYNYFHSNNMFYKYQAGFLPGHSTVFQLLETYDDIVRRIDEGKSCCMVFCDLSKAFDRVWHKGLLYKLKMYGIDGKMYXWLKSYLANRTQRVMYKNLFSTKAQIHAGVPQGSVLGPLLFLIYVNDVAHNMSSFCRLFADDNCLQYSSKCVKTIENCLNHDLNVLENWSKKWLLKFNPSKTKVIFFNTRKNLEPPKLIFQDSQLEYVQTHKHLGVTFSSNLSWSSHIEILLSNAYKKIGLLKKLKFKANRKTLSLMYTSFIRPQLEYASVVWGGCHAFDSEKLEKLQLXAARIVTGLTIFASRESLYFETGWEPLNARRKIQRLNIMYKIHNNLVPEYLSDIVPDMRCNASAYYTRNSQNYNIPVCRLQIYKSSFVPTVVNEWNSLPLDIRDSSSLSLFKNKISKSLAVAPPYFSYGKRRTNILHTRLRQNCALNIDLYRCNIISSPLCSCGKIEDAHHFFFSCPKYATVREEFFNKFLRFGKIRILDSRSLLWGDDSLSVDENKYLFSIVQIYIQGTGRFE

SEQ ID NO: 2872 - protein, 538 aa, synthetic construct
  source 1..538: note = Description of Artificial Sequence: Synthetic polypeptide
MKGPKFREPRSFTWRRNFIHIMNSVEDYAKRWAKSEKEELDTLSEWVKSIRCILKSRIKRLRGQMKTIYPSVFNKAEVRKELDRLHDQYVLVPADKASNNIVFVCKAHYINCIFKELGFDSTHGNPTYTHSSLSKQEILQNHKSVMDIFNIPNTQNEFDLPYLYWIPKLHKSPYKQRYIAGSSKCSTKPLSLLLTKILTVVKEKLQEYCTTIYSRSGVNQMWILKNSKELLETLRSQNLTKINSIKTYDFSTLYTTIPHDKLKSRLFDIIDSCFFNKNGSRKNAYLVIGNLKNYFVKNHSDCTHKYSEVDIKKMLEFLIDNIYVVFGNQVFQQSVGIPMGTNCAPLLADLFLYSYEAEFIQKLVREKNKSLAVAFNSTFRYIDDVLSINNCYFHTYVDSIYPSELEIKDTTESASSVSYLDILLEMDIDGNLTTKLYDKRDDFNFSIVNFPYLCSNIPSSPAYGVFVSQLIRYARACSSYEQFLRRGKLLTNKLIKQDYQQSRLKSSFRKFYGRYNDLVSKYNLPLGRMLTDVFHTNC

SEQ ID NO: 2873 - protein, 1416 aa, synthetic construct
  source 1..1416: note = Description of Artificial Sequence: Synthetic polypeptide
  VARIANT 30: note = Any amino acid
  VARIANT 42: note = Any amino acid
  VARIANT 49: note = Any amino acid
  VARIANT 1400: note = Ile or Leu
RAILTLSCPFIKIKSTHCHRPLTLLWNDLXWLRMGIARFMKXVSVGLYXIPWKTQISQLLQQIKFEPSEDILSVAKELVAHLDDSAQVVAAARLKNRKIDKPGLVKISFARVDQKIRVLRAKRKLGEISDYRSVFLRSSKSHTERLIELNARTILNEMPNGKDFRITANGRIVKKTDNEPNTRDESSSELPRPFETIRIGHLNVCGWTNKNHDLRVEIIKYTDCDIVSINETHLLNKENLDLDGYQWMGLNRSNVHVKAPKGSGGVGLFIKKHLCKNYKVDIIDNSFDGILGVKFTNKFSDYVFVVFSCYLPPESSPWGRDASSFFSHLLTQIYIQYDTDSIFICGDFNARISNIPDFDKDLDTIPPRLTIDNVHNQHGSSFLEFLNDCKFCVLNGRFGNKSNDYTFQSTRGHSVVDYICVPHDVYNSVLRLSNNFLMEDLAINQMTIHFNRQEVIPWLTIYVFLMMFTIQCSDFQIISCSDIVENAGLVSMQGENCRIPDHGFLIFDFMIRDFENAHPSENTVTSSTRPIKKYKLRCIPPSFMSSVNVRGSLLNMIRIIETCRESRENIDRTYTQLCNIITKEMECSIPKFDWSKRSRKKFRTHKPYWNNELTELWRVMREKEKTFLKHKKGNSVLKQKSFSEYKRAQQELDKRMRFFRRKYNLDLAINLDNFSSNNPKKFWEELRSLGPKRKNKVPTECYTDDNDGSISSDPTYVQNVWKSEFCNLYNPSTDVAQQPSNDAFLQRVKESVNFMENNMLDPLREHNPYLNRPIELDEVKNVIMKSKNGKSSGVDEIPYEVLKYDCVIEVIHRLFMLCFESHIIPSVWRQAIICPILKDSNSDPRVPLNYRGISLLSTIYKMYSSILNHRLVSYLEDNNLLVDEQNGFRRERSCADHVFTLNSIIQNRKETFVAFIDLQKAFDTVDRDLLKFSLLNNGIDGDFYNSIKSIYGNTVSCVRVSELCTDWFSTSAGVRQGDNLSPTLFALFINDLAKEIKELRKGITVGEINLGILLYADDIAILSDSKENLQKILDTVSYWCEKWRLHINMKKSGIIHFRKKGPRSDFQFQINSNILQYNTDYKYLGVIFHEKMNFQNNADTLSKAGGRALGGMISKIRSIFPKFGPYKEIGISTFEKLFLNCVAPVLDYCSEVWGLQNYHSIEMVQNRALRFYLGVHRFTPLPALHGEFGWKLCYHRHCINAVRLWNRLLTMEDDRLTKRVFLWDFNQTGLSRWTSRIKSLFESMNLLHIYDNLSICDVNEFENKLFLTYENEWLGKINQLPKLRLYKSIKTNFKTENYLEMNISKSQRSILAQFRCGILPIRIETGRYKGEPLDERICNFCVLNEIEDESHFLLNCTIYSDFRRELFNNIGYNPTLVMSNLDCIFFLLSNFPRQTSKYLXESYLYRQSLLYKKRNA

SEQ ID NO: 2874 - protein, 1521 aa, synthetic construct
  source 1..1521: note = Description of Artificial Sequence: Synthetic polypeptide
MNLSSPSPSKPPKKKKQRTKSSTQGKMATTQQGACTNSVYPNDNLSQSVQPIQQVGNLTYHQLQPMQYIQSAHAPMQTHMQHQPQNVQSNTPQVTPQWVSDIVTQLKNMNQKLDTIDTTLSSMKREIKGLSNRVVEVEKSQEFISKSLEDNEKNTSKALTELSDLKMALDQSLQENVRITESVLDMQCRSMRDNLLFFGIEEAQSGEQENCEDIITSLCASKLEIRSEILIERAHRLGSKKNNKPRPIVVKFNRFPHREMVRKCSYKLKDTHISIGEQFPKEIQERRKKLLPIYKRAKENNQKAVLARDKLFIDGKLYSDDGPVQMKATPTQPKASGRRGQKHGRGKRGQENQTGLRIIAWNIHGGLENKWSERNFKSFLCTYDIICLSECWIGKDFNISDQNFQSFVFPRKSGKSQGGGTVVLIRNVYTPFISFVESLHDTIVWLKIDKSFCNHTKDIYIAFTYFPPSNSTFLKERDIDLFMELENQLSYYMSIGDIFLFGDFNSRTKTLPDYIVNDQVHESVLDNNLQYSSDNQLTERVNPDLGHNEYGQRLLSLCRSTGVRIVNGRHSGGHSNDYTFNGARGLSTIDYLLTTYDMFDFISKFIVCNFTTFSDHAPLHIEFKCTTLLDPCDTSSHYRTRNVFRWDSSYVDSCNDFFNSIEGTCNFVDFEKVTSQSDLDECMLKITDMLSKDIGNFFYVSSKNSNQSKPANSRSRYSTYLSTNDKPWFNENLKSLYRDYITALRTFNVCKNAQNHLNLVSKKRTYKKLEAKLKRSYKQIEGNRLNILKKNNPRQFFAKFRKKPKSVGNVPIEIFFDHFKKITNVDGSFDTNCEQANMEVLIPIVNKPTDECVFYELDKEIDVDEIRKAISNLKRGKSHGEDGILNEYFINFQQHLLPLLYSLFNCILDTGFFPKSWSSSIIVPVYKKGDCTNPDNYRGISLVSNMAKLFTSILNNRLLDWSKTNDVITDAQFGFKPNCGTRDAIFALHSIVTNTLCKRKRLYCAFIDFKKAFDSIDRSKLWLKLSKVGIQGKLLNVIKALYNDVKSCVVVNGHLSDYFCNNVGLMQGEVLSPILFNLYVNDFEMNFLKSGCIPHELLSLNLFLLMYADDMVLFSESVEGLQLLLNELSHYCKTWNLCINVEKSKIVVFRNKGKIKCNEKWCIGNDVLEIVEQFTYLGIIFQYNTKFTKAEKQLSDQGRKAMFAFRKNIRGMILNHETLLSLFDCYVGGIINYASEIWGSHKGNNVEKLHLDFCKQTLGVKRSSFNAAVYAELGRNTSYYKKVLFNFKILEGCVMVGIPLITKRFCSILKFWKDVLCSNNCIIQKCYEEMYINCELHGHKNWASDVKKILNEIGFNEVWNKQTIDSLTLKVINQRIADLAKQDIFGKIENSQKCHFYKYLVDGFYLQYYLRKSVPVKFQQCISKLRLSSHRLAIETGRYNNTHRAQRNCFSCKNYVEDEFHFILVCPVYIEYRQKYIKKYFYEKPSMFKLLQLFNNENFKDMCNLGKYIYYSMKLRNDICN

SEQ ID NO: 2875 - protein, 1268 aa, synthetic construct
  source 1..1268: note = Description of Artificial Sequence: Synthetic polypeptide
MDDKVQQSYLSILTLNCQGLGDINKRRDIFKVLKSKNYNIYFLQDTHFVEKEESLIKGLWGYKAYFNSYKSNSRGVAILINNNCDITILNEHKDSDGNFLLLDVTIESLPFLLINIYGPNSDSPAFYINVLNKIQDIYSNQHIVIGGDFNLVFDKDLDSMNYKNLNNPKARLEVLKIMETLTLKDVYREHNPTLKKFTWRKKNPIKQARLDFFLISESLLNLSLYVKYENSYRSDHCPVVLYVRTNEFLKGKGFWKFNNSLLKDKEYVYLIKEKIKNVKQQYACPVYNLENIETIDDNIQFIISDQSFLDTLLMEIRGKSISYSTYKKKKTTEREKQLEQEILLLEQNFTVETKDELSNKQTELELIRKNRLQGQCIRSKVKWIEEGEKPSKYFISLESRNFSSKIIPKVEKEDGSTVFNQFEILNELRMFYDNLYQKRETIDSENIYEKLKLYDIPKLNKQESDLLEGPLNKLEVYNFLKNMKNDKSPGPDGFTSEFFKFFWNDLGSFITRAINNTYELGHFTESNKLGVITCLPKAGKPKQFLKNWRPISLLNVLYKIASGCIANRIKTVLYKLINEDQTGFLKGRFIGENIRMIYDIMQYTEQNQIPGLLMLIDFEKAFDTISWKFIYQTLDFFNFGISIKNWIQTFYSDIKSCVIQNGIASDYFFPQRGCRQGDPISPYLFLLCAEVLGILIRNNKEIRGIEIDGVEYKLSQYADDTSIIFDGSPQSMDGILRELDYFACISGLKINFSKTKMVWIGSKKISKEVFHHSRWKLDWNNPTFDLLGVKFSVNLNEMVELNYPSKFLEVTRLIKQWKLRNLTTVGRLTVIKTLIIPKLNHLILTIPKPSVEYLQQFEKEIYIFLWGGKVHKVKKNIIIQDYRYGGLKMIDYMEFVCALKSTWIRRLIHSNTKWVKLFESELGLKIETLWEKGSDFITNISNKISNKFWKEVLLDWVKIVMSYSQNDIKVLNEHIWFNPNIKINNSSIFIKNYFNCGYKFIKDLMTEEGNFVSLETLENSNVKTNFLEYRSLKGAVFERLKALNNNKVEYGPFIPNSLSIFYKQSKGCKDMYYVLIDNKKESIRSVKKWTESGFAYTEIEWNNIFELPFKTSKESKFQWLQFQILHRILPTNEYLFKLNIIDSPACSFCNQDIETIEHLFVDCFHVKEIWLYFEEWLRSKFNFLMTFDKKTILFGKFKNRNMYRLQNILILTVKQFIFASKYKNVPNLSTLMLKRTVTDRIHIEKLLLLKNCKFAEYEKYWQTICDLL

SEQ ID NO: 2876 - protein, 441 aa, synthetic construct
  source 1..441: note = Description of Artificial Sequence: Synthetic polypeptide
  VARIANT 31: note = Any amino acid
KQSRVLQGDILSPMLFSLFLEDLETHLHENXSAGIEIDQINIFLLLFADDLAIISETPNGLQKHLNTLHTYCERWGLTVNIDKTKVMIFQKGRTRKGYKFCYNNKNLEIVDSFAYLGTVLSPNGLFNKHVKITAEKTLQLYNTFMYKTQKLSLDCKTMMELFDVACSSKMNYGAEVWGYTNAKDLERVHLKFCKRLLGVKTSACTPAVYCELGRKPLLLTRTLRIIKYWFKVLRSQNCLMKSIYDYDLKNMLSSWIIFVKNTLLSNGFGDVWYYPESVNEKMFYVYFEQRLSDCFYQNLRVEIENAHPLRLYKYLNLPVHQAEYLNHILYDKHRKALSRLRLSSHRLRIESGRYDKKCPINERKCIYCKSNDVEDEYHFVLVCDFYTELRKLYIKKYFYVRPSMAKFIDLLNSDSIFMLKKLGKYVYESFNKRDNFTIRRE

SEQ ID NO: 2877 - protein, 1096 aa, synthetic construct
  source 1..1096: note = Description of Artificial Sequence: Synthetic polypeptide
MKNRHKLSNRRSGGLILAFKDTIVKYIKVLETDCKFIFLFKLSKTLLNISEDAVCGLVYIPPEGSRYSSPDCFSEIEQEIINVESNCKYLCLFGDFNARVGKMQDYYTPDDFLAHVTHCEIQSEVATRSIIFDNYQIPLDRIVRDHTINNFGYKLVEFCKNNDIYIMNSRVGNDKNIGGTTCKDSSTVDYVLASANFFAIVESFNIKNFCDLFSDVHNPISFSFSICINDAKNNIPGKNQPSVKLWCADKADDFRNNIQMSAVCEIENELNVLSSCIDNICKDNISKIAKDICTVFVNTARETFGMSKHVDNFSNEKSSKPWFNRVCRTARRKYHLAKRLYNRNNSTDNKENLKVLSKQYKRTMDGCIKDYKKTITKKLVNLRSTNPKDYWKILHGSRRDEKCAVSIDDMFQFLKDMNEGCENGESNIDNPDFIGTCMYDDILNGEISDEEIVAAVKKLKNSKAAGYDLIVNEHISSTLSIFLPVYKKFFNIIFCSGFVPDEWLIGIIKPIYKNKGDPTQPENYRPISLLSCLGKLFTSILANRLEAYATETNLIYENQAGFRKNYSTLDHILTLQFLCDIFMKRKKKLFCAFIDFKQAFDTVWRTGLWSKLILNGINGKCFRYIKNMYMGIKSLVKLNGIASNFFECNVGVRQGENLSPFLFSLYINDLENFLLEKNIVGLQSISNEIENELLLHLKLLILFYADDTVIMAESTEDLQNALNEFYSYCTQWKLNVNVNKTKIMVFSKGPTSKKLFYYKGEVIENVKEFKYLGIVLSRTGSFIKARKHLCEQAQKAMYGVIRKIRNFNLPVNCQFDLFDKVVLPVLLYGCEIWGFENLDIIERVHLKFLKTVLNLRSTTPNFMIYGETGRYPLYINVYTRIITYWGKMLISPENKIVYTVYRYLFSQHFNSDCKSPWIDCIQRILNMCGLQYVWQNHNFVNIEWLSATVNQRLKDQFMQIWSNDINCSSRGQVYKILKPYFGFEKYLDILPVKLRKKFIKFRTSNHRFPVETGRWYNIPLNERLCLLCNKGLIGDEFHYILECSALEEIRKKYINTKYWKRPNFFKFSELMTNCNCKSLRKLCVFISKIFDAVCSS

SEQ ID NO: 2878 - protein, 1164 aa, synthetic construct
  source 1..1164: note = Description of Artificial Sequence: Synthetic polypeptide
  VARIANT 36: note = Any amino acid
  VARIANT 366: note = Any amino acid
  VARIANT 996: note = Any amino acid
  VARIANT 1046: note = Any amino acid
  VARIANT 1096: note = Ile or Leu
MAGDTIEQYRAAIGLFYCCVRCVKKCFYLNLFQLRXLFKCLLQYLLWFGNLYKTLSMCLAQHSLVIDYFFQVIFMLLFLSGDIETNPGPCTGTQYTLDIFHLNIRSIRNKLDSLLSLVSDFDVLCFTESHLNSSIPDRNLFIDGFNTIFRKDRNSFGGGIIVYVSNSLRVKRRTDLEPTNIECIMGNQQTLNALWVEISDPTCNILLCCTYRPPNCDNSFWRNLSWSIEKAYDESDKIIVVGDLNVDFLNIPHTHLVKDLLSSHFLENTITEPTRVTQNTSTLIDPILVTRDVSFFDSGVLDVHHTISDHKATYIYVKSNLNLNSAYKRKVWLYKNADFDKLNFLITHTDWETLIMGADDVDQAAXNFSETFLSHIRKSVPEKTVTIRPKDKPWFDSALRKEIRQRNRLRKIAMNSRNALDMQKFKKSRNKVNNMKKYAIDNYYNNLEINLLDSSKNNSKLYWRLLKNVFDIKMSTEIPPLQFALKNGNQSIAYTNTEKAEVLNDYFSSISCLDDNDARLPEFNSECNNFICDVCISEQDVIDIISIIQVNKAVGPDNISHKMLKNTMYTIAKPLCSLFNRSLRDCTFPSSWKISNVLPLYKKGDSSQMSNYRPVSLLSCVSKIMERIIFRHVYNFFHDNNLFYKYQAGFLPGHSTVYQLIETYDHILRAIDQGQSCCMIFCDLSKAFDRVWHKGLLFKLHTYGITGNLFKWFNSYLVNRKQRVMYREVLSSIKSINAGVPQGSVLGPLLFLIYVNDIADNMLTFCRLFADDNSLQHAAINVHDMESYLNRDLLTLEVWSKKWLLNFNPSKTKAVYFSNKLTQTNTVTPTLKFQGCDLEFVPTHKHLGVIFSEDLSWSSYINSIIANAQKKLGLMKKLKFKLNRKSLSLLYTSFIRPQLEYASDVWGGCSINDSDKLEKIQLIAARIVTGLPIFASRESLYFETGWETLYSRRKISRLKTMYKIDRNLLPSYVMDIFPNKRANVSNYSTRNAHNYXIPKCRLELYKSSFVPTVVDEWNALSTDVRGSDSVRIFKEKIHVSVKNENXLTCRTRPNFFTYGDRFLNIIHTKLRHNCALNNDLFRCNIINSPLCSCGKXEDTYHYFFTCNKYKDARNVLFNDVFQIVNLNIVNTHVLLWGDSSISDNENKHLFTLVYNFIKNTERFN

SEQ ID NO: 2879 - protein, 390 aa, synthetic construct
  source 1..390: note = Description of Artificial Sequence: Synthetic polypeptide
CESALNLLLLKWKQCIEKGNIVLSVFVDLKRAFETIDRTKLIRVLKKSGIRGTVLKWFSSYLENRKQVTRYNDAVSAETAVDLGVPQGSVLGPLLFILYINDIKQALKRVQVNLFADDTVLFVVGDSFDECFDIMNEELGGFSEWLKWKKLQLNITKTKCMLVTTRQTKDCRRSVQMDGGIVERVETMKYLGVMLDEKLNFNEHIDYTIRKAARKFGVLCRINRYLTAETKVQLYNSLIAPHFDYCSSILFLATQRQMKRMQVLQSKIMRLILRCDRLTPRRSMLECLQWMSVKQRIEYNTLVFVFRVKERMAPQYLTEAMVRGRDIHEHDTRGADDLRLQIWRKACTQNSLFYKGFKLYNQLPEAAKMTSNINEFKRSCKEFVRQRPLE

SEQ ID NO: 2880 - protein, 701 aa, synthetic construct
  source 1..701: note = Description of Artificial Sequence: Synthetic polypeptide
  VARIANT 35: note = Any amino acid
  VARIANT 65: note = Any amino acid
  VARIANT 142: note = Any amino acid
  VARIANT 453: note = Any amino acid
  VARIANT 466: note = Any amino acid
  VARIANT 589: note = Any amino acid
RRADFESLSRALRGIEWSSVLDPVDIDLAVDTYTXILGRLIEQFVPKIRKVVSHHLPWQTQELRXLKTQKRAAFKVSNGSVHLRDYYLRINHSYQRLSRRCFANYQRKMQKKLKTDPKKFWKFVNESRRESGLPTSMRLADXEGDDADKICQLFAKKFAGVFCAEPITDEEVRAAAENVPRRDELLASIEIDEGTIQAAAAKLKHSCSPGPDGIPSTLLKRCSSSLSAPLLHLFRLSLSSGKFPVAWKQAYMFPVHKKGDRTNVENYRGISALCATSKLLELVVIDPVFSHCRQDLADEQHGFFPKRSTATNLLCFTESIINSFDAHSQTDAIYTDLSAAFDKINHRIAVAKLERLGFRGSLLAWFKSYLTGRSLRVRIGDALSDIIDATSGIAQGSHLGPVVFLFYFNDVNYTVTGPRLVYADDLKLFARIDNSNDAEALQRDLDRFAGWCXVNRMILNPGKCQXITFSRRHFPVTFDYRINDTSVERVTHVKDLGVILDTQLTFKQHLSYIIAKASRQLGLVIRMTRKFTDIYCLKTLYCSLVRSTLEYCSTVWSPHYNNAVCRLESIQRRFVRYALRQLPWTNPLXLPPYEQRCRLIDLDTLQLRRDLARAMTSADVLLGRIDCPDLRNQIQLRVPTRQLRHTPALEVPFRRTNYSANGAINGLKRAFNKVSSVFSLDVSRTTLRFKFVSLLRSLLRM

SEQ ID NO: 2881 - protein, 1378 aa, synthetic construct
  source 1..1378: note = Description of Artificial Sequence: Synthetic polypeptide
  VARIANT 14: note = Any amino acid
  VARIANT 20: note = Any amino acid
RALRRIFLGADKRXQPDSAXSASSSCPTCTNKTVNAESHAKVNAETNTKVNVEVNPEIYAGHGADPKGYGTNFACESQWFTYGSRDRLTNTLRSTPSLPQQSSVQHLPASSPGRAVESIMRAPRLPDATAPSPSYRTRSPASRSHQRRPGAGVGVGGGVSQTAPLGKYPSQLQVSLPDACPTYSSSLITSSSTRTANASPPAQAIQSSPGRTVESIMRAPRLPDATTSSFSYRTRSPAGCSHQSRPGAGVGVGGGVSQPVLFGKYPFQSQRVLPDASPTHRSCPSTSTSTRTANASPLPAQAIQSSPGRTVESIMRAPRLPDATTSSFSYRTRSPAGCSHQSRPGAGVGVGGGVSQPVLFGKYQFSTPHTSPDARSDFSATVPPSTFVTLAAPGCVYHGTMEDLGSANSGMPAALTASDPASASSERGFLNVYYQNVRGLRTKTNSVLLALSSCDYDVIIFTETWLVPGIKNSEFAAGYDIFRCDRSAETSSLQRGGGVLVAVKTGRNCKDVELVGCGSLEQIAVRIVLPHQALFICCIYIRPASNIDVYQLHTGAVQQILGMAGVRDLVLVVGDYNLPALTWFFDDDTHSFLPINASAEQEVLLLESMLSCGLLQINNLASAHGNLLDLAFVSDATAAELIDPPCPLLKPDAHHKPILLKLDYDHGGNDDLDDADEIFDFNQCDYALLNERISAVDWDTLLDTSSVDESTANFYERLNSILHEVVPKKIRRMSHRYKLPWWNDELRTLRNRLRKATSRYMESKTAWDKVTVQNIEDEYNALNQESFRSYINNTQRSLKSDPSKFWSYVNSRKNANRTPTDVSYRDLNSTSPAIAANFFADFFKSVHSSDAIPPRDHEFEYVPTHYLPLPLPVLNDEETLKALSGVDGAKGPGPDGIPPSLIKACADSLTVPVKRIFNDSLRKGVYPAMWKVASITPIHKSGSTKKVENYRPISILNCLAKVLEKIVYDRLYAVVRPIISDDQHGFMQKRSTTTNLLTFVHSTVNALESGEQVDAIYIDFEKAFDKVPHALTVRKLRKLGLPAWITNWLLSYLTNRKAFVNLRIARSSTFDIPSGVPQGSHLGPLIFILFVNEICALTNSNTLMYADDLKLFRSVKNNVDCCSLQMDVNALLHWCESNGMKVHVKKCKVISFSRSRNPLRFDYTMGDGCPLDRVNSIRDLGVTVDRKMKFNEHIALTTGKAFAMLGFLKRNTAHFDDPFALKVLYASLVRSVLEYAAVVWAPYHVTLAARIERVQRAFVRFALRKLPWNNPLILPSYEGRCLLFRLQSLAERRTLMQRLFVFDLLRGNIDCRSIRNNVRFNEPARQGLRGERPLLWIPRHIFDYGYNNPLDVCFRQFNEICSCFDYVVSKTVFKTRIS

SEQ ID NO: 2882 - protein, 1354 aa, synthetic construct
  source 1..1354: note = Description of Artificial Sequence: Synthetic polypeptide
  VARIANT 79: note = Any amino acid
  VARIANT 81: note = Any amino acid
  VARIANT 84: note = Any amino acid
  VARIANT 333: note = Any amino acid
GESESRGREHGRVTRPPLAASPGRAVESHVRVPRLPDTTTSSPSHRLIRPACCSLQSRPGAGVGAGGGVSQTATLGKYXSXSQXPLPDARPTSSSCAISSTSPPVRTPNAVRAFWSSPGRAVESHVRVPHLPDTTTSSPSHRLISPACCSLQSRPGAGVGAGGGVSQTATLGKYHSSLQNPLPDARPTSSSCATSPPVRTPNAVRAFRSSPGRAVESHVRVPRLPDTTTSSPSHRLISSACCSLQSRPGAGVGAGGGVSQTATLGKYHSSLQNPLPDARPTSSSCATSPPVRTPNAVRAFWSSPGRAVESHVRVPRLPDTTTSSPSHRPISPXCCSLQSRPGAGVGAGGGVSQTATLGKYPSGLQNPLSDARPTSSSAAFPSTINAKGTSTPCKLRIYYQNVRGLRTKIDAFFLAVTECDYDVIVLTETWLDIEILSPQLFGSTYRVFRNDRNERNSDKKSGGGVLIAISSRLDCVLDPTPVCDTLEQLWVRLTVGASQRVCIGAFYLPPGLNRSIDLIKDHLESIGNVLSHLNLNDSFIQFGDYNQPGLKWIPSEEGGLEIDPVQSRVPLVSSYLIDGFNLHGLSQLNPCVNVYNNCLDLVLVNEVALPNCAVLAAVDPLLPQDIAHPALEMFVDVPAPSATAEPPLNSQQSFNFRKANYAAIQEELSRIDWSFLETAPSIDAAVDAFQSILNNLFTEHVPLRRPPQKPPWSNPTLRKLNRLKTAALQEFSNHRSPFFKSKFNLASKRYRGYNRTLYRRYVIRTQRDLRRNPKNFWSFVNSKRKADGLPPTLYLDDVAAATSEEKCALFAAHFKDAFNSRFASEAEIIEATRNTPINAIECSLTEVANCQVSAAINKLKLSYSPGPDGIPSSVIKRCSGALLSPLTCLFNLSLRQSTFPDKWKASFMFPVHKKGDKSSVKNYRGITSLSACSKVFEILVNNVLFDSCKNYISTDQHGFYPKRSVVTNLAQFVSHCLQEMDAGAQVDAVYTDLKAAFDRVDHGVLLKRLERLGVSASLVRWLKSYLTNRILRVKIGNSESDMFISLSGVPQGSNLGPLLFILFANELSMLLSEGCRLFYADDVKIFTVVRSVLNCSALQRQLNHFNEWCVRNFLTISIEKCSTISFHRKLKPVVFDYAIAGNTLARVTQVRDLGVTLDSELCFTIHLHDIVSRANRQLGFIFRIADDFRDVACLRSLYCALVRSILEFCSVVWCPYQSTWTAKIESVQRKFTRLALRRARNPAGWNTYEERCRVLQLETLERRRHVSQATFVAKVLAGEVDTPWIRAQIQIYTPARPLRQRQYLQLAHRDTNYGQHEPVRFMCSRFNVFSHLYDPNISTPQFQQRARLWYSHQL

SEQ ID NO: 2883 - protein, 947 aa, synthetic construct
  source 1..947: note = Description of Artificial Sequence: Synthetic polypeptide
MNTRALEYRLACSAISYDVIAVTETWLKNNTLSSQVFGNGYEVFRCDREQFINSQKKDGGGVAIAVRQGLNARIVSSDEWKCVEQVWVAIDLADHTVYICVVYIPPDQTNNASVFEINSSSVSTVSSMARPYDELVILGDFNLPRLIWRPSRDGFLYADPELSTQTLHVTEFLDNYSSALLQQINQFPNENNVLLDLCFVSCPDIAPPIAIAPAPLVKDVRHHPPLHLSLPVHLASEFTPIVCEVRYDYRKSDVPSMLELLRSIDWENTLDKDNLDDAVQTFTNIIGYVIDRHVPKKPVTNARVPWQTSELRRVKAAKRSALKKYSKHRTLPLHNYYVRLNSCYKRMSKQCHADHEVRTQKKLKSNPKGFWKYINEQRKEIGLPSSMFLGDKTASNTEDICQLFAAKFSSMFTQEDLSQQQITAAANNVLPNGLALNRITIDRSQILEAATKLKSSNTAGPDGVPSIVLKKCIDGLLDPLAHLFSLSLSTGSFPKLWKHAYMFPVHKKGDKRNADNYRGISALCATSKLFELAVMDPVFFFCKNLISDDQHGFMPSRSTTTNLLTFTTFVTDSFTAKSQTDAVYTDLSAAFDKLNHSIAIAKLERMGIGGVLLRWFQSYLTGRKISVKIGDWLSAVFEAFSGIAQGSHLGPLVFLLYYNDCIHSISVPRLSYADDMKIYCRIDNASDAQVLQQQLINFAEWCKINRMVVNPTKCSVISFSRKRNPIKFEYQICGTSIPRENCVKDLGVLLDTELTYKQHISYIVSKASRQLGFVFRTAKNFTDIYCLKALYCALVRSTLEYCCSVWSPYYENSVARIESVQRRFIRYALRSLPWRDPFRLPSYESRCELINLDTLAVRRNVCRSLLVADVLTSRVQCPAILRGLNIFAPIRTFRNSPFLRVPIRQTNYAMYSALTGLHRAFNFVASLFDFNLSRDVIKRKFLLFFRR

SEQ ID NO: 2884 - protein, 1005 aa, synthetic construct
  source 1..1005: note = Description of Artificial Sequence: Synthetic polypeptide
  VARIANT 155: note = Any amino acid
  VARIANT 192: note = Any amino acid
  VARIANT 303: note = Any amino acid
  VARIANT 1004: note = Any amino acid
MEPESGLRATETARRKTDWRNGTTLGMKTRTRIGTWNVLTLAQAGKLETLGREAVRLKLEILGLSEVRWPDSAEHKMPTGQVLLYSGLRSENAQRGFLLSPNARSALITWKPINERIIVARFRTRVRNLTFVQVYAPTDAADLQEKEEFYSQLSXVVNEIPKGDIRIYAGDFNAKIGSDNTDLERIMGPHGXGEMSENGELFTEFCGNQDMVIGGSLFPHRSVHKVTWVSRDGKTENQIDHICISRKWRRSLLDVRNMRSADIASDHHLVVGEIRLRVARVVRQEEKVGCRFNVQRLSNPEVXRAFVGELQARALEIPDSTVEEEWQFIKDAFAVTGENTLGMLRTQRKEWISDATWDKIEERKQAKAAIVSARTRATKARTRQTYAELEKAVKRSCRRDKRAWTDSLADEGEKAANNGDMRLLYDISRRLCGARTNTRIPVKDRSGQLITDPADQLKRWFEHFEQLLQISHPRPSPQYHPQNVRRINRVNSSPPTLREIEEAVKGMKSGKAPGIDRISAEMLKADAHLSARMLHRLFSKIWDTATFPVDWMQGILVKVPKKGDLTNCDNWRGITLLCIALKVLCKVILCRIKSKIDESLRRQQAGFRSGRSCVDHIVTLRVILEQVNEFQDSLHLVFVDYEKAFDRLDHENLWEALGRKGVPERIINLIKAQYEAFVCRVVHNGVLSDPIRVVAGVRQGCILSPLLFLIVIDEVLAGALDRVQNRGLLWQPIRMEHLNDLDFADDIVLFSQRGNDMQNKLDDLAACSSAAGLKVNVSKTKSMAVNTERAQGFTVAGENVEKVDTFQYLGSQIAPDGGTKLDISTRIKKARSAFAGLRTLWRSNQISLRTKLRIFNSNVKSVLLYGSETWCVSSQNTSKLQVFVNRCLRNILRAWWPRNWVSNAELHRRCQQRPIHVEIRERKWRWIGHTLRKDAHEICREALDWNPQGQRGRGRPRGSWRRSLHQEISAVDGTLSWRQVKAKAENRQQWKSFNAALCSTGEQXA

SEQ ID NO: 2885 - protein, 849 aa, synthetic construct
  source 1..849: note = Description of Artificial Sequence: Synthetic polypeptide
MHSAKTLNQTTITMATKPSEHNKFIGLKKIIAGIHKDIAFLKKCVEHRVTPTSHKIRTKGHTDSKIIRRVELELVKESIKKLYGRLSIKTLECYSLHLKLAKEFPIEFEAFLTKVKVAEKCESERKRKILDNKFRQLISHIAPTMKPVVKPLEEFVVNRSSETFSEEQLTLLNKGLKYAVSSKPNLENIVIDIETVINANSIDEKQTKPPPLLPAQINSVRMTVSKLIREATTKHQDNAEVRVVKELKEKPVYYLKADKGNRVVIMDRDEYDKELLEKLGNREKYSLQRGYTLIDMVKKVENTIKECAGLLKSVGKTAKSLRVPNPTLPRIKALPKVHKPGNEMREIISAVDAPTSRIAKWLVEEFKSMPKPFPSRSIISSQVFTKELLESGPIAEDEIMVSFDVTALFPSIPVKNAIGTLRDWLQSQYEGEPWRQKTIQYITFVKLCMEQSYFQFRDCIYQQRMGASMGNPLSPFMSDVYMAALEHELQTKNLLPERWWRYVDDVFCIIKRDSLTTVLDTINSARRSIKFTYEMEVEGKLPFLDILILREPGCPSSFSFEIYRKPTNTRRTIPATSNHSFQHKMAAYHYFIHRMTTLPLSEAGKQKELEYIFETAEINGYSRTTIQAIIDKKERKLHRTSLTTLTPSAEPLRRAAVEFDYRITRPLRQKLAKFGIDLVFSSRNSQLESILGSTKDPIPTLGKPGIYEVSCGHCDMSYIGQTKRLLQTRLDEHIHTYVKIAMEEKRKGFVPHFKSAVTEHIIEEKHNITASDAVILRHITNPSKLAVAESLEIFKAGNKRLLNKDSGNGSTWLFKLLPIQAQKKNEEVVPTVTTNTDTPAMNLQSRTEH

SEQ ID NO: 2886 - protein, 743 aa, synthetic construct
  source 1..743: note = Description of Artificial Sequence: Synthetic polypeptide
  VARIANT 13: note = Any amino acid
  VARIANT 56: note = Ile or Leu
  VARIANT 84: note = Any amino acid
ARNCFRRVYACNXDTANLQPAELQPKTPGPAVTPVPESTESLTYDFTRCDFEAVNXALSQINWTGILAHCSLDEAVSRFYDALXDVIQLHTPLRRLHPPSNRKPWWNATLRNLRNRLRKARTRLHKRRCQPNIAEVRELEELYESQQNAAFSEYIHRIETDVKQNPRSFWTFLKSRKKGSGIPTEISNGCVEANSVEEQASLFADFFSGVYSTSLPAPCNEVVDHIPTHDLHLPVVHFSIEDVSRALDDVDVTKGPGPDSIHPSFLKNCAASLALPTTIIFNRSLAESTFPTAWKLASITPIHKAGNVHKVENYRGISILSGFAKLFEHLVHGALYPVLKPIIANEQHGFVKRRSTTSNLLLFTSTLLTNIEKGQQIDAVYVDLSKAFDKVPHALLLEKLRRYGLPEWIVRWIHSYLADRKAFVKVRCTSSHLLAIPSGVPQGSVIGPLLFILFVNDLCSVLESDKLMYADDLKVFRSVSSPLDSCALQQDIDRLLRWCTANGMEVNVQKCKIISFTRKRTPLLSSYRMGQNELERVNTIKDLGVTIDSKACFNEHIALTTAKAFATLGFLRRNAADFVDLFALKTIYCSLVRSQLEYAVQVWAPYYAVQAERIERIQRAFTRFAVRRLPWVRPQGLSSYDDNCERLKLPALASRRVLLQRIYVFDLLSCNIDCPTLRDKITLHIPARNLRNPAPFLEVPGHRTNYGYYSPLSACCRVFNDVADVFVFGMSKCVFKTRIKNRT

SEQ ID NO: 2887 - protein, 637 aa, synthetic construct
  source 1..637: note = Description of Artificial Sequence: Synthetic polypeptide
  VARIANT 628: note = Any amino acid
ALKKLKSSKRAALKKFSKCPISVNRLNLNQISNDYRRLNKSLFLAHQSRVQNRLKQNPKGFWKFVNEQRKESGLPSTMIRDGVEVSTSSEICDAFRVQFSSVFADNNLSDPDVAAAADSVPDSGLVCSDLQVSREDFNAACSKLKSSTSPGPDGVPAIVIKKCANSLSEPLLRIFNLSLSLGVFPNNWKESYVFPVFKKGCKQDVKNYRGIAALCAVSKLFEVIVLEFLRHNLSHVVSDDQHGFFPKRSTNTNLVTYISKIQRAISDGYQVDAIYTDLSAAFDKINHRIAIAKLRRVGLHGSLLTWVNSYLTGRTMLVKISDNLSLPFSVTSGVPQGSHLGPFLFLLYINDVNFLLRCPKLCYADDFKLYAIIKRPTDMEDLQAQVDLFADWCRLNQMVLNPSKCSTITFTRKRCPTFFSYKILGNPLTRDSFVKDLGVLLDSKLSFKNHISYLCSKASKQLGMIFRMTKYFRDVNCLKILYLSLVRSTLEYGSVVWAPYYHNDIGRIEAIQRKFTRFALRHLGECPNYETRCSMLHLDPLSVRREAAKAFFVADLFRSNINCPFLTSELNVNIRRRVLRSHSFLVIPGARTNYAFNEPVSSMCRVFERCYPFFDFHLSRPRLKHDIXNFLREAYVF

SEQ ID NO: 2888 - protein, 965 aa, synthetic construct
  source 1..965: note = Description of Artificial Sequence: Synthetic polypeptide
  VARIANT 94: note = Any amino acid
  VARIANT 163: note = Any amino acid
  VARIANT 240: note = Any amino acid
  VARIANT 744: note = Any amino acid
  VARIANT 785: note = Any amino acid
MTNTVNNVQELRFEPINATLKNNLSKENGFKVGHLNTCSIICHHDDVKNIFTRTGFDCIGFTETWLNSDIKDALIKFDNFEILRHDRNSTTRVXGGGVALFVRPEYKTKIIKTSPRDSIEYMFCELKVVSCKLWLVLSINPQPIKSSQLQVVVGVIYKPPTLXDFSFFFEDLGNISSTYNNIILMGDFNINILVSNPMSNNFTRLINSFSLSIVNKSFPTHFHNTGSSLLDYFICSENLXSTLFSQVSVPAVSHHDLIYTVFNLPVPVASLKTISFRNFNRIDKEAVRNDFPNFNFDQLNGIVDCETLASNFNHKLIQLVNKHAPLKTKTILPTSCPWYSREAYNACVDRDLAYRFWKNNRTLENKLIYNRFRNRATNLIRIAKKQYSAKLFDPTLPSKTIWKNFKSLGFRDDPDNLDDKFKPEDVNNCFIQKIENYPTGNRQPTIIPDIVEEDQFKFRAVTEDEVHKAILRIKSDAIGYDEIPLKFVKLFLDLLVPYITLLYNKIISTNTFPTIYKLAIVKPIPKIKNPSNPNDLRPISILPSLSKGCEILLKDQIVQYVTFKKLITPFQSGFREHHSTSTIITKVCQDINASFDSNYVTVLILLDFTKAFDLIDHRIFIDKLKEQFQFSSDACDLMKSYLSDRSQLVQINGVRSQFRSTKRGVPQGSVFGPLAYTLSVNDLPSFITHCNKQSFADDTQIYLSCPVDQLPNKISLINSDLSAISRYCKDNGLVLNTSKTKAIXFSRQNTVLPHLPPIQIDNENVEIVDECLNLGIKMNKHLTWXDHVSLIKKKVYSTLRTLNCHRHTLSIDTKIKLVHTLLMPHFIYGNVIFSKMNVDTERHLQVCFNSCIRFIYNLRRFDHVSQFQRSIFDLSLSKFYQFQLLLFLFKLINFKEPQYLFESLVFSRSNRTNNIIIPVHHTNFMGNSFAVRGARLWNDLPHNLKSITLFSEFKRRCKEHLKNSI

SEQ ID NO: 2889 - protein, 425 aa, synthetic construct
  source 1..425: note = Description of Artificial Sequence: Synthetic polypeptide
LYENIFGCLIANNFVKVVAYADDLNILVRNNHEFDTVLQLVSYFSIYSKIKLNFAKSQYLRFNGCLSGPHQIKEVESLNVLGVLICQNFNKLVEINYDSYLNKLKYTLSLHQKRILNLFQKAWLLNTYVLSKIWYICQIFPPNNKHLAAIKSICGQFIWQGFIFKVPRNELYLPVIKGGLALTDVESKAKSLFIKNILYSNADGNAPLDNFMLGQINNSTLTRNMREWIVKADELKLESHLNSSKKIYDFFIHSLNIKCKTMEDMPNLMWSNLLNNLDSNFLNSKCKTVLFCIFKDIVLNKKKLHLYGIRGTDSKFCENCGLVESVSHLVKYCQTSEEIWRWLKNILNKRLKILVKDPDELLSLSIGDRDFKYKAALWLTVQTIVYNLEKRGFGDLNEFKQGIRIVRFNNKAIFERHFKHFLNIF

SEQ ID NO: 2890 - protein, 1455 aa, synthetic construct
  source 1..1455: note = Description of Artificial Sequence: Synthetic polypeptide
  VARIANT 2: note = Any amino acid
  VARIANT 8: note = Any amino acid
  VARIANT 12: note = Any amino acid
IXRTQRRXFLGXFKCCREHSGKSATPPVPTLNDADDAEFAARVCTAIDSKDTGACFGVDWRSGRFTHGSSDRITCGTIVPTIPASFRSSSQHLPVRVLQSSPGRAVESLMRAPRLPDATTSSPRQRLRTPASRSHQSRPGAGVGVGGGVSQPAPFGKYPSRSQHFLPDVRPTSSSCASTSATQTAIVSPPSFRAIQFSPGRAVESPMGAPRLPDATTSSPRQRLRTPASRSHQSRPGAGVGVGGGVSQPAPFGKYPSRSQHFLPDVRPTSSSCASTSATQTAIVSPPSFRAIQFSPGRAVESPMGAPRLPDATTSSPRQRLRTPASRSHQSRPGAGVGVGGGVSQPAPFGKYPSRSQHFLPDVRPTSSSCASTSATQTAIVSPPSFRAIQFSPGRAVESPMGAPRLPDATTSSPRQRLRTPASRSHQSRPGAGVGVGGGVSQPAPFGKYPPRSQHFLPDVRPTSSSCAGPSATQIANASTLSATVPSQLANDVQPQRPGSVDRRDSSLLTIYYQNVRGLRTKTNQLHLSLSSCDYDVIAFSETWLNAKIVDSELSSDYTFYRADRSRETSVLERGGGVLIGVKKRFHPEPIHLRGGEKLEQIAVRIPLPGKTLFVCCVYIPPNSDATIYTQHSSCVQQLCDLAQGPDEVIVVGDYNVPNLTWHFDEDINGYLPSGQSTEQEVALIEDVLGTGLQQMFDLPNANGRLLDLALVSDSSRFQLIEPPRAILKVDAHHRPFILVLETQSTGTAAEQSGTYYDFANCDTMALNNSIASLDWANLLLVGSVDDIVERFYDKLNEIIREVVPLKHRRPHPNSHQPWWNRETRNLRNRLRKARKRFLKHPTEMLGRELADRELHYEMSLEAAFRGYISGIESNLKREPKSFWAFVKKRKQDKGIPQDMVYRDSSASTPDDSVQLFADFFKTVYSANQPTTSNESLDKILPHELHMPLVCLTEEDVRKVLASTDASKGPGPDCIPPSIVKQCAATLANPLAIIFNRSLESGVFPAKWKVASITPIHKSGNVHNVENYRSISILSCLPKVFEKIVHEFLSRAVQPIISACQHGFMAKRSTTTNLMTFVTDVLRSMESRCQVDAVYVDFAKAFDRVPHQLAVEKLRRLGLPEWITTWLHSYLTSRSAYVKLGGSKSGLFMIPSGVPQGSHLGPLIFLLFIDDLCHWIKNDKVLYADDLKFYRTITSPLDCLALQSDIDSLMRWCDQNGMEANAKKCQVITFDRKLRPITHAYMMGISLLDRVCSVKDLGVTLDRKMTFNEHITSVTAKAFATIGFIRRNTTAFKDIHALKALYSALVRSQLEYAAQVWAPYHNVHIARLERVQRAFVRLALRTLPWRNPPEQTSIEDRRRLLGLDTLLKRRQRMQQLFIFDLLTKRLDCQKLSQLLIVYVPPRNLRRNPSMFRLSVHHTVYGHNQPFDVCCRLFNVVSDRFVLNMTKDSFKKLISC

SEQ ID NO: 2891 - protein, 1002 aa, synthetic construct
  source 1..1002: note = Description of Artificial Sequence: Synthetic polypeptide
  VARIANT 43: note = Any amino acid
  VARIANT 78: note = Any amino acid
  VARIANT 107: note = Any amino acid
  VARIANT 680: note = Any amino acid
  VARIANT 700: note = Any amino acid
MARRLEIRNKRQKPIEKQTTDWRLGSWNCRSLNFLGFEFALAXELQPRNFDVVALQEVCLEEEQVLDWPGRQTNSRFXLSGGKDKKLGTGFIVRGKMQDRVFGFTAXSERMCKLRIRGRFFNYSIINVHCPHEEKTDDEKEAFYATLEEVYDGCPRQDVKIIIGDMNARFGREEMFRPTIGPESLHAVTNDNGQRCIDFAASRGMVVRSTYFPRKDIHKATWTSPDQRTKTQIDHVLIDGRFFSDVTHVRTFRGANIDSDHYLVGVDMRSKLSTVFNQRRSRRAPPFNTACLQNGEVAHSYAQQLEANLPGEEELGAASLEDGWSRIRSAIGSAAEATLGSAIRVSRNDWYDDECQRITAEKKAAYDRKLHKATRGNVERYRQARNRQVAVFKLKKRQQEDRDCAEMEQLFRANETRKFYEKVNRSRKGFVPRADVCRDNGGNLIVNKSEVLDRWKQYFNEHLNGDEADGDGVGVNLGAPAADEQFPAPDLETVKREIRKLKNNRAAGKDRLPGELFKYGGEKLARALHCVISKIWEEEKLPEEWMDGVVCPIYKKGDKLDCGNYRGITLINAAYKILSQILCRQLSPHARRFVGPYQAGFTGARATTDQIFCLRQILEKCREYNVPTHHIFIDFKAAYDTVDREQLWQIMHENGFPDKLTRLIKATLDGVMCHVRVSGXLAEPFGSRRGLRQGDGLSCXLFNIVLEGIIRRAGIETSGTIMNKSYQLLAFADDIDIVARNLETVMDVYTRLKVQARRVGLGMNTTKTKYMRGRGSKDVGPPSLTPLTVDGDELEEVSEFVYLGSLVTADNDTSKEIRTRIFAGNRAYFGLRKTLTSDRVQRRTKLTMYRTLIRPVVLYGHETWTMRQEDERALGVFERKVLRTIYGGVQVSDGVWRRRMNHELHAFLEEPTIATQAKIGRLRWAGHVARMDESQPVRLLFDRAEPAGGTGRRAGKPRARWGDQVNGDIRKICNLGNWRVAAQDRERWKRLLATARVPGALC

SEQ ID NO: 2892 - protein, 1013 aa, synthetic construct
  source 1..1013: note = Description of Artificial Sequence: Synthetic polypeptide
  VARIANT 388: note = Any amino acid
MAARPHAAASLCPDRTVFSCFLSCESQCFCTSSSRLSVFKRAYSREFLLDVGRAAFLELNSAHAEQLRDLGLLRRPTSSPTPTTASRPQRRRHKRRERKQKRGKRGGIRARLTANPHKPSIPTIVLANVRSLDNKLDYIRLLRSTQRTVRDCCVFVFTETWLSDSVPDCAIQLDQLTCYRADRARVAGGKTRGGGLCVYINDAWCRDAVVICKHCSPLVEFMIIKCRPFYLPREYTAILLVSVYIPPNNNNSNRNDALNELYQHISEQQTAHPDAFLIIAGDFNHADLKSVFPKIHQHINFPTRGNNILDFVYTTQRGAYKALPLPHLGASDHITVMLMPAYRPLVKVAKPVQKQIQVWPEGSSDALQDCFDTTDWNMFKQAATYNNXTDLQEYSETVTAYITKCIEDVTVTKTITVRANQKPWMTGEVYRLLETRNAAFRAGDEGGLRTARANLSRGIREAKRQYSRRIAHQFSDSRDTRSLWQGIQTITDYKPPQRTCDSNISLLNELNTFFARFEAQNSTTAQKTPPPPSDQVMMLTPDSVRRSFSRINARKAPGPDNIPGRVLRDCAAELTDVFTDIFNISLSQAVVPTCFKATTIIPVPKKPSPSCFNDYRPVALTPILMKCFERLVMHHIKSALPPSLDPFQFAYRSNRSTDDAISTTLHSALTHLEKKDSYVRMLFIDFSSAFNTIIPQQLIHKLVELGLNTSLCNWLLDFLTGRPQAVRVGSNTSSTITLNTGAPQGCVLSPLLFTLLTHDCTPSHNSNLFIKFADDTTVVGLISNRDETNYRSEVSRLAGWCSDNNLSLNVEKTKEIVVDFRRAHTQHVPLTINGATVERVSSTKFLGVHITEDLSWTDNTAALAKKSQQRLYFLRKLRRARAPPPIMYTFYRGTIESILTSCITVWYGACNASCRKTLQRIVRAAEKIIGVSLPSLQDIYGTRLTRKALCIAGDPTHPSHSFFSLLPSGRRLRSLQARTSRLKDSFIHQAVRKLNSLPNLPPRPSSASGTTEL

SEQ ID NO: 2893 - protein, 985 aa, synthetic construct
  source 1..985: note = Description of Artificial Sequence: Synthetic polypeptide
MVAKVYGLGTARASPINDAQAHRPTPAISGQGLPCQVRARLKTLVPQRKLRFATWNIGSLTGRCRELADVLMRRRVQCAFLQETRWKGNKSRNIGQGYRLIYTGSPSGKAGVAVVLSEELRNGLLEVDRRCDRLMRVRVLIEGVITNLISAYTPQAGCSGSEKESFWEQFEEVLRAIPAAEVIIVGGDLNGHVGRAAETFDRVHGGFGYGRRNAEGENILRTCIASDLAVVNTFFQKTPQHLITYKSGSHSTQIDYLLTRRCHISKVTNCKVIPGESLTAQHRLLVMDYVVTPKKKVAEKRKPRIRWWLLNGTMQTSFRAEVESQNLSTNTETAQEVWDRAQSAIITAGKRVLGLSKGGRVIDKETWWWNDEVQEVIREKKTAFKKWQQSNSPEDRLEYIAAKRASKRAVARARSDRLSPLYDTLETAEGQKLIYKLARARDKATQDIAKCLSVKDSQGTLLCNHASVKERWRCYFKELLNTQHPCSLPTEIPPNLGLIAPITPDETRNCLRRMKNRKAVGPDDIPIEAWKSLGSLGVLILTDLFNRVLNTGTMPHQWRYSYITPIYKGRGSVQDCGSYRGVKIMSHTMKLFERMIDLRLRRECTVSECQYGFQPGSGTLDAIFAIRTLMEAYREKRRALHVAFLDLQKAFDCVPRQCIWWALRFKGIPEAYIDIIRDMYRDSVSMVRTAVGDTKPFPISVGLHQGSALSPFLFNVVLDTVSANIQDQPPWLMMYADDIALIDESRLTLERRVNLWKGTLENGGLKLNVTKTEYMACGSPDSCTIHIGPEPAVKSEKFRYLGSILHESGGIDHDVQARISAAWAKWRDVTGVVCDRRIPTKLKGIIYKSIIRPVLLYGSECWPTLSRHTQELHVTEMKMLRWMCGVTRADRIRNTFIRGSLGVRDVADKLQESRLRWYGHVARRPENYVGKICLDMSVPGARPPGRPRKRWLDTVKQDMRANGLTTADAKDRAKWRSLSRKADPG

SEQ ID NO: 2894 - protein, 946 aa, synthetic construct
  source 1..946: note = Description of Artificial Sequence: Synthetic polypeptide
GHSENTGSPWFVIPGNNGRRREQKAETRKKSGCVDDSGKPHTSHRSPASSYECQIIANKMDELGFSWTMQGLLPLMLTESWLHPGIPDAAVELTDFTLHRHDRNHLSQKQRGGGLCIYISEKWAKDTKAVESLLPRFGVSDSNHCSPDLEYLTVKCRPFFLPREFSSAVFITAVYIAPDANANSALNLLHNAISSQLNKYPEAAHIIAGDFNHVDLKIVFPKLHQHVNCATRGGNLLDKVYSNIKRGYKTIPAPHIGQSDHISLFMLPVYSSLRKRDPPTLKTVTVWPEGASLQLQDCFAHTDWSVFESQDLEEYTTSVLSYIKHCTDTVTTEKHIRVYANQKPWMTGGLGFCALYRHCHHRETHQSVCQPKTLDDRGVRILLKERNIAFKSGDKERYSAARANLKTGIRGAKLKYKHKIEGYLHSNNSRQVWQGIQNITNYRPNPRSVGVDNTLAEELNCFFARFEQQSAEEATLHSLSNPSHVFTVEEDDVRKVLRTVNPRKAAGPDGITGRVLKDCADELTGVFTKIFNLSLSQAIVPLCLKASTIIPVPKKTTINSLNDYRPVALTPVVMKCFEKLVRSHILQRLPPAFDAHQFAYRENRSTEDAIAIALHTTLTHLEHKDSYARILFIDFSSAFNTIIPKRLVSKLNHLGFPFSICLWIQDFLSNRSQRVKVEHHVSSALSLSTGSPQGCVLSPLLYTLYTHDCTPFHSSNTILKFADDIAVVGLITDGDETAYRDEVNQLALWCTDNNLALNTLKTKEIIVDFRRNRPDTLPIHIHGDCVEIVSNFKYLGLHLDQNISWKTNTIALVKKAQQRLHFLRVLKNNNLAQELLVSFYRCTIESVLSYCIPVWYASCTAQEKAALQRVVNTAHKIIGCTLPSLEELFKARCYSKACSILKDSSHPAYHLFQMLPSGRRYRTIKAKTNRLKNSTYPRAVAIMNGH

SEQ ID NO: 2895 - protein, 987 aa, synthetic construct
  source 1..987: note = Description of Artificial Sequence: Synthetic polypeptide
MAARAQREAQGLSSFCIFAVLFLLISGLFVQNSGAFTSYTRQELLDIGLCIPDSFISNLRLIHEIARTPRAGRPARPGGSARRPRRERKQRRGKRGGLRAKLKLTPHRLSLPSIFLANVRSLVNKMDEIRLRINHSKRLWNCNVMIFTETWLNSGIPDNAVSLTEHHTFRADRTADDSGKTRGGGLCIYINKAWCTNSVVVGRHCSANLEFLMVKCRPFYLPREFTSTIISAAYIPPDADAKLAMNELHAAISKQQTAHPEAAFIVAGDFNHSNLKTVLPKFHQNILCHTRGNKTLDHVYTNIAEAYAVTPLPHLGQSDHLSLFLTPKYSPLIDRVKPSVRTIKVWPAGVDSTLQDRFQHTDWGMFASQATHGSHTDIDSYTSSVLEYINTTIDSVTTQKQITTYPNQKPWMNKEVRLLLKARNTAFRSGDAQAYSTSRANLKRGIKKAKHCYKLKLEEHFSNSDPRRMWQGIQAITNYKPSQSTPTATDVSFLNELNDFYARFDRDNKEPYTRITSSTDHSPITLTSSEVHTALSRINGRKAAGPDGIPGRVLKVCAEQLAGVFTDIFNLSLNLAAVPTCFKTTSIVPVPKHSSPTCLNDYRPVALTPIIMKCFERLVLAHLKDSLPSTLDPHQFAYRGNRSTDDAVSIALHSVLTHLDNKNTYARMLFVDFSSAFNTVIPSKLLIKLRDLDIDTSLCNWIMDFLTNRPQNVRSGHICSTTVTLNTGVPQGCVLSPFLYSLFTVDCRPVNRSNTIIKFADDTTVIGLISNNDETAYREEIQHLATWCTDNNLLLNTNKTKELIVDFRKGRTGSHDPIHINGMAVEPVSSFKFLGTHISKDLSWTTNTSSLIKKAHQRLFFLRQLKKNQLSSAVLVNFYRCTIESILTNCVTVWYGSCSVAERKALQRVVKTAQRITGTTLPAIEDIQKKHCLRRARSILKDTFHPAHRQFSLLPSGRRFRLPRTKTSRLRNSFFPRAVSLLNSAPH

SEQ ID NO: 2896 - protein, 1229 aa, synthetic construct
  source 1..1229: note = Description of Artificial Sequence: Synthetic polypeptide
  VARIANT 983: note = Any amino acid
  VARIANT 1073: note = Any amino acid
  VARIANT 1087: note = Any amino acid
  VARIANT 1128: note = Any amino acid
MATGGTGVVITLLVYCYFTSLTAAIRVDPVRMFCSIYPLSYHNDNPHIYKDLGYKRKGNELAKTSTGYGTYALAVTMVYPSLYNKITKKKKAMTTTQSSRTGLIIAICLMLSGDIHPCPGPHHFKTPREANPQTEDKRATLTLQVCSSCTLLCSSAQQANPLLSLCPTPNTLKLSVQGVECVKGAAAVPGWSDGERQGEKTHPRLCVGMSDRSFGREFAGRVCAFRGNKRPDPETQQQQQTFLNDSASTMATNSVNRKRLNPGVVKNRKHAFFNTVNNSKIVWDPKMKPKGLLGRHLNIRSILSKSEQITHLLTNSNLDYLCLSETWLYKYAPSAAFNISGYTMFRKDREGAKGGGVMIYVKDNLQCEEINWLCDYEFECLGLNVRLSPQMSFKIIVIYRPPSSDGTFYDRFEKLLKESNLNKETVILGDFNINWEDTSCRNKLKRITDKFDLVQMINGPTKITTSSSTQIDLIFTNRPERIIKTYNMLAGISDHNLTLVARKLSKKRFKFSAREHEFIGIPRNRRDGFKNAVEQIDWDRLLLGTDLEKDRGSFVGTIEKTVKNSALNLNANTIKIYYPGLTLTYHTKTNERERFCVKKVIKSKSASDRNMFTTLRNRVVKNIRKAKADYFLTLIEKAKGDSKTIWNQLKKVVRHDTKNKKMLEVMIDGHITNNACKIAEAFNNFLLTQFQIWSHCVHQKFLTCALFFINSVSNMVPLCPSKISNMCSLNSSQPIFSISNISESDALQAIKSLKSSRTKETFGIDSLMLKELSSTLLTPITKLLNRSISEAIFPCVWKSSAVIPIFKNGDHYSLSNYRPISIIPTVSKVAEKLIANQLIKHLNTTTFSLHPMQFGFRSQHSTETANCFLIENIKHLLDKGGVVGAVILDLKKAFDTVNHKILLSKLTKFNMSPESLKWFESYLSNRSQSVRINNYHSSPLSLPTGVPQGSILGPLLFSLYINDLPSVCQNILIQMYADETVIXTHGKNTTQVAEKLTQAMAHVSEWLNQSCLKLNVSKTVAMYFSKTNIVNNLTDIYVDGDKLQIVSDFKYLGVQIDSKLTFKSQIKKVCNRXKFNIRSHLSLQAAXIFMHSMILSHITYCLTTWSQANKTTLKPIESLYKQSIKILXKKPLRHHHCSILQKHKLLSWENVIKYSNICLLYKIIHGLSSPPLSQFVNIRNSTHRATRGAARGELYRPTPEKYLWSGCLFSYSCTGVEFCPWQHQRYNLL

SEQ ID NO: 2897 - protein, 290 aa, synthetic construct
  source 1..290: note = Description of Artificial Sequence: Synthetic polypeptide
  VARIANT 26: note = Any amino acid
  VARIANT 226: note = Any amino acid
  VARIANT 274: note = Any amino acid
VRNHSINFHCYADDTQLYLSIKPDEXNQLSKLQTCLKDIKSWMSCNFLMLNSEKNEILVLGPKNLRDSLSKDIVTLDGITLASSTTVRNLGVIFDQDLSFNSHIKQTSRTAFFHLRNITKIRHILSQTDAEKLIHAFVTSRLDYCNSLLSGCPNKSIKTLQLIQNAAARVLTGTRKRDHISPVLASLHWLPVKCRIEFKILLLTYKALHGQAPSYLKELIVPYYPXRTLRSLNAGLLVVPIVSKSRTGARAFSYQAPLLWNQLPVVVREADTLXTFKSRLKTFLFDKAYS

SEQ ID NO: 2898 - protein, 1142 aa, synthetic construct
  source 1..1142: note = Description of Artificial Sequence: Synthetic polypeptide
MKAFMRQTRKALTEFRKQLTSSFEVFSIMETQFLDCKLLNESPKRKIANNNKNSLQIPSPCIAAVGIPSPISACLNSILAVNNSAGPGTSGLQSSFAFNNTSPGSEPGASGLQPNQNTGTTAEGSSTPQQLAPGPGSLHINPDHATTIAPAALPSSQPAANQPLSAIPLSGVAPRSNAADLPLRGIAPNRSVFVSRLNPEATADCVKSYLCQKLGAQPNSISVFKFNFKQPRNISSFKITLPESMFSNALDPTIWPEHTIMHEYIRKGASQDPNSVDAKNCKKLNRSISVAYQNVRSLLGKLKRVYSNSTLLDFDIIAITETWLNTTVYDQEIFVNKFAIYRLDRPTRGGGVLIAVLNSHSSELIPYDNMHSIEFIAVKVTTDKCNVFLTCSYIPPGSDPAIYLHHLSAISAVSLAVGDADQLIVLGDFNLPHLSWLPNSDSNILFPENQHEFIDGLTNLSLGQVNSIKNSRERILDLIFVSDVSVATVSRCDPVSTPEDSYHPALYLSVHINFETTNQSASQRGNTIRDNYESICLTTREHYTGLNSHFDRLNWSTLYSFTDLDSAVLWFNESVCSALDTFVPSYRWKLIKASLVLQAFVLHIPLSQVTVGNSLKPPWFSRHLSYIKNTKSLLKDIKNPRFFYAEYIAECRQNIRSDPKKFYSFVNSKRKSNVFPPCLHLGNLSESSDINISNLFATFFQSTYSLPHINNIHIPPFKISDVLNGMLTIDESFSAGPDKIPSCIIKQCAASLCGPITFLFNLSLQLSFFPSVWKTSFLIPLHKKGSKTDVGNYRGIAKLSAIPKLFERLVTCQIQHMCSSIISTSQHGFVKKRSPSTNLLEFSRLIHCSFLQKKQADVIFTDFSKAFDSVNHSLLIYKLSLIGFPPYLLDWISSYLSNRSQRVLFKNVVSSLVNVTSGVPQATSHLGPLLFILFINDLPQVMSYCTTFMYSDDVKICMSFSNLSSHLLIQSDLNKFQAWASTKLLSLNYSKCKTMSFSRTTFHTTSYTLGNSLLERVVKINDLGVLFDQKLCFNSHISVMVNKATGVLAFIKRWAKEFNDPYTTKSLYVSLVRPIMEYCSEVWNPQYVYQQNLIESVQKQFLLFALRNLNWDPDRHLPPHLSRLKLIDLNTLKHREFNCKIF

SEQ ID NO: 2899 - protein, 824 aa, synthetic construct
  source 1..824: note = Description of Artificial Sequence: Synthetic polypeptide
  VARIANT 759: note = Any amino acid
  VARIANT 806: note = Any amino acid
MGDFNAKIGPNFTRMRSATGGHGIGTRNNNGDRLVEVCQMFQLIIGGSMFPHRDIHKYTWTSPSGNTRNQIDHICISRKWRKSLLDVRNKRGASIDSDHELIIGELSIKLDRNRPRNADDSRNHRPSPLNIHLLGETDISARLASTLRTHLLPQQGQTWEQTCDTLRTTAEGIIGTQQRRRNNWISSATWDTINKRNSLKLLADRDSNRRDEHRALCKAVKRAARNDKRALLDRLADNAERAANENNMRSLYQTIEQISGGYRRKTQPVKDANGILLTSDDDQIHRWRQHFMEISNSDMPSRSDDYRSVAPANGNRRISSAPPSVREIGNAIKKLKNNKAAGMDGIPAEILQVDTQLMAEILHPHFSSAWESEHIPDSWKCGVIVKIPKKGDLSDCNNWRGITLLNTSYKVLATILNERLTEKFEPTLRDEQAGFRPHRSCVDQANTLRIITEQAVEWRAPLYLLFIDFKKAFDSINRAAIWGALARKGVPHKVIALIKALYDDANLAVLHNGKTSAPFQTNTGVKQGCPLSPLLFNIVVDEVMREVCKHKRGITWSFTRHLEDLDYADDICLISHKLSDIQSKVDDLVNLASRVGLQINTAKTKAMRLNHASQGNIIVDGNPIEYVESFPYLGTVISSNGGVTEDVTSRLAKARSAFGRLYRIWRSRQIRRKTKIRIFNSCVKSVLLYGSETWLTTKTIIQQLQAFTNKCLRIICGIFWPNRISNIDLWNMTGETAIRLQIRKKKWRWIGHALRKDQXSIVRTALEWNPQGSRRVGRPKATWRRTALQELSQYNITWDTAKQTAXNRVRWRNLVEALCSQEEL

SEQ ID NO: 2900 - protein, 393 aa, synthetic construct
  source 1..393: note = Description of Artificial Sequence: Synthetic polypeptide
  VARIANT 14: note = Any amino acid
  VARIANT 41: note = Any amino acid
  VARIANT 43: note = Any amino acid
  VARIANT 62: note = Any amino acid
  VARIANT 108: note = Any amino acid
  VARIANT 113: note = Any amino acid
IVNNKWTILKEHTXTPSKVFLDIVKFCIQDNRYLKYETKLXIXLKGMPMGSPASPVVADIVXETLLQNTTEKLRRPPRLLTKYVDDLFGIIKEDEIENTLTTLNAFNXNIKFXMELEKDNCIAYLDTVVIRRGNELKLKWYKKPIASGRIINFNSRHPKMMIRNTASSCINRMLRISDAIFHEEIINEIKTILTNNDFPKHMIKSLLDKYLKSDNNQRPPKKERTYISVTYVPGLSERLAQSDCYDKENILIAHKPDNTLKQIFNKTKSKIAPTDKKDVVYRIPCNGDGKNNCNSIYIGTTKSKLKTRLSQHKSDFKLRHQTNTQKTALMSHCAKQGHSPNFEETTILAQEQHYRKRYMMEMLHIINTPTNIRMNYKTDTENCAHIYRHLLGK

SEQ ID NO: 2901 - protein, 996 aa, synthetic construct
  source 1..996: note = Description of Artificial Sequence: Synthetic polypeptide
  VARIANT 400: note = Any amino acid
MKEAEEASERDRFNVDDHGKRKKDNDLRVCTWNVRTLYRPGAAQQLADTLKKCRADIAAIQEMRWIGQGCIKKKDCDIYYSCHPERHEFGCGFVVGARLRRRVSHFLPINERLATIRITAKFFNISLICAHAPTEEKDDVTKDTFYAELDRAYGRCPSHDIKILLGDFNAKVGREDIFGATVGRFSLHETTSSNGLRLIGFAAAHNMVVRSTGFRHLDIHKATWLSPDRLTRNQIDHVVIDARHASSVLDVRSCRGPNIDSDHYLVAAKIRTRLCVAKVARRGLLRRLDIGKLQSQQTRDAFSTQVSGLLSRTTPTPEDISDQWALISHSLRTSAEEVIGFQRPPTRNPWYDQECRDATAAKDAAYRRTLQAGATRAVVEVYRLRRRDEKRLFRRKKREXEKRECESIESSRCRNEARNFYQRVKRLTQGCKTGGVACKDNDGNLVTDAEIVLKLWRDHFSSLLAGSGTGYEDYDPQTPIYGTDIDVPTPSHAEVKDAIQRLKNNKSAGADGLPAELFKAAGDMLVGSMHQLISKIWRTESMPEDWNLSMICPVLKKGDATLRTNYRGISLLPVAYKVLSSVLCENLKPHAEALIGPYQCGFRPGKSTIDQIFTLRQILEKSYENQIDTHHLFVDYKAAFDSPRRDRLYAAMSELGIPAKLIRLCRMTLSNTISSVKVGNDQSETFSTKCGLRQGDSLSCMLFNILMESIVRKAGVHRTGTILSNRCVQLLGYADDIDIIGRTKRDVTAAFGAIEKESAKVGLAVNMDKTKFMVCSSRESRRLDSQLTADSYSFESVKEFIYLGTAITSTNDVSLEIKRRVTLANRCYFGLSRHFNSRALSRQAKITLYKTLILPVLLYGAECWTVVQSDAAALGVFERKILRKIFGPICVGDAYRIRWNHELYELYGDVDVVSRVKIHRLRWLGHIARMEEDAPARKVFDAVIVGKRRRGRPRMRWQDQVMEALSTSGAANWRRRAQDRDAWRQIVQQAVTRQGL

SEQ ID NO: 2902 - protein, 996 aa, synthetic construct
  source 1..996: note = Description of Artificial Sequence: Synthetic polypeptide
  VARIANT 835: note = Any amino acid
  VARIANT 955: note = Any amino acid
MQLIQLNLNHCRAAQDLLTQTVRERGSEVAILSEPYRIGNSRDWATDRTGKAALWLCGVGAQQMCDIKAADGFVRANVGGTWLYSCYLAPSLSLESFGRILDELSIDLRGHSNVVVGGDFNAWAIEWGSSRTNARGRAVLETFASLDVVLLNEGSRQTFSRAGAGSVIDLTFVSSALARRARWTIGEVYTASDHEAIECSLGMAGRPSGPPPLPRRAFRQDTFRPRAFASALEGFAVDEADGANVMANKLADAVEDACDRSMLQRRPFRGNHRPVFWWSEEIAELRRICHRSRRLLQRARGSPLLVECSERYKAARKALKIAIRDSKRESFLKLCDAAEEDPWGGAYKMTVKKLNAGGNAPSDPEALEGIVRALFPDGQPVGNFPRAEPGEFRSVTEAEVLQAGRNIKPKKAPGPDGIPSRATKLALALLPEQVAGLFNKCLQEGTFPVRWKRQRLLLLAKPGKPPGEASSYRPICLLDIIGKVFERVIATRMTEAVEAAGGLSTEQYGFRKGRSTMDAIMKVVKTAREAIAGSRWKGGTKSYCLVVTLDIRNAFNTADWGRTLESLRMFNIPSYLLNVALSYFSNRVLTTDTCLGSRAYKVSAGVPQGSVLGPLLWNAMYDGVLRLPMPEGTSLVGFADDVAIVVVAKELATVEAHADAAVQAVESWLANAGLQLAAHKTEAVLVSSRKAVETASVRVGGTTIRSQRAIRYLGVLLDTRLCFKEHLEFVHKKASGTAGALSRMLLNTRGPKQATRKLLTTVVTSQMLYAAPVWAEAAKVKSYVRGVEATYRLCAVRIACAFRTISEDAALVIAGQVPLTELVRERAEIYAAAQXREATQQTRAESKITARRRSLENWQNRWDSSQKGRWTHTLIPNLTSWVERSHGQVDFYLTQVISGHGCFRSYLKRFGHETEDWCPVCGSGVVEDARHVLFECHRFDHERQELEAVAGSSIXAETLVPMMLADQRVWEATATFAADVMKSLREQERRRKEQTE

SEQ ID NO: 2903 - protein, 430 aa, synthetic construct
  source 1..430: note = Description of Artificial Sequence: Synthetic polypeptide
SVAPCDNIFNFVCVSQCDVLDCILKVKSNAEGLDNINPKFLKLLLPCLLPYVTYIFNSILTQSSFPTAWKLAKILPIPKQNNEYRPISILPFLSKVFENVLAGQIQGFLDRNLLLHNKQSGFRRKRSCLTAITDITEDIRQQLDKNHVTILTLLDHSKAFDSVNHNILCTKLKNLFNFSDSSVRLIASYLTDRLQAVVAGAVTSAVKKLTRGIPQGSVLGPLLFAIYVNDLPNVLSDCEVHLYADDVQIYVSSPVREINVCISTCNRMLSLVQTWAEHNGLSINPKKSKSILISRRPIDTNDLTKPIINNIPISYVDHAVNLGLTFNNTLSWGNHISKATGRVYGILRQLANTRNFLPEHIRLLISKTILIPTLFYGIEIFGFCDTRDTRKLVTALNSIVRYVFNLNRFDHVSHLTTKLLDLNLNSWINL

SEQ ID NO: 2904 - protein, 846 aa, synthetic construct
  source 1..846: note = Description of Artificial Sequence: Synthetic polypeptide
  VARIANT 284: note = Any amino acid
  VARIANT 286: note = Any amino acid
TIDPAEIANTLGDLWSKQAKDSNFSPEFRTNKMLITPHNTYAPTPTAIEIEKNINLIELNSAINSLKGHTPGLDRISYSMIKNTPISFKFRILQHFNDILDSHIPQSYKLSLVLPILKPNKPKTNPNSYRPISLNPCLAKVLDKVVANRLWWFVLSNKLIHNNQFGFKRGRSVLDSLLYVDHLATRSLSLKKHISIISLDFAKAFDKIGIHSLIHQLEKWKLGPRIIKYVWNFMTNRKIIVKNGTSLSISFPLDNGIPQGSPISVILFLIAYNSLTNIISIPNXLXFTAYADDFHLILQHNRNNNPQVNLSTLFHQIGEWCSYSGSSLSIDKCQLLHICRKRSCRANIITGSINIPTTDHTKILGLTINKRYSWNHHITNLKTSLSRPLNIIKHLSSRKYNCNTTSLIQIVNSILISKIDYCLPIYGKAPTSILNCLKSTQNSAIRAALGAFRTTPINNLLIEAKINTLENRCKLLTSKLGTKLILSHNSPIGKLSKSIAKTKRNYRYPSTLDRIIDSCKSFSLPFSPAKFYTSKKYNPGIILKATNTSLSLYNKNTTSPITYHQLFHSIKNSLHDHKFIYTDGSKTNDTVGYSVTNNTDIIKSGLLPQYSSVISSELIAIHEAIKICSGSPGKYAICSDSLSSIKSISNVNNYSYYPNTIRSLITKLFPKIRLIWIPSHIGIQGNERADTAAKETHKYPLIFTDNFNTKDITQLLKKHYTDKLNSLQAQTTQWYKQILLNTPANFSFKTTNLNRQQQIIINRLRLGHTQLTNAHYMNRSLTSICPFCNTSAIDIQHILIDCTALSHVRTICFSNDNPIHLLANPTAANSNKIIYFLHKMNLIHKI

SEQ ID NO: 2905 - protein, 900 aa, synthetic construct
  source 1..900: note = Description of Artificial Sequence: Synthetic polypeptide
  VARIANT 405: note = Any amino acid
  VARIANT 469: note = Any amino acid
MHNICATGNFSYILEMEGSVDVSHSHTLLRILAKQRSGLKICHINAQSLPKKIEEFRYMFVNSGLDVICVSETWFVQDFRDSLISCDGYYVYRGDRVSHGGGVAIFVSKKLKTKFVCKHPDNSQIEYIFLEISNKFASSKILIGCIYRPRCDITYNEIISLLGDISLNYADIIVAGDLNSNMLRETHLKNEFESIGVHLVNSVFPTHFSRTCSSLLDVFFVSDVKKVYLFDQLIVPSFSKHDLIYLTYNFDLQYNDESIVFRDFKNLDYGLLMTEFDKCNWNNIFVSPTVDQQLAQFQNNISYLYENFVPVKTKVIKHSVKSWFNNDIKLAIKSRNDAYQKWKRYRTPEHYGRFKLLRKTVTKLIDSAKTNFYSSRFQTTASTSRTWKEIKSLGIGRKPAAPEQXVDIEELNTSLSKCNVPEICENNMYLRSVPRNLCDSRFRFVCVNQCEVLVNILKIKSDAVGLDDXNPKFIKVLLPKILKYITYIFNTAFTTSTFPDRWKIAKIIPVPKANKEYRPISILPYLSKAFENIMASQINSFIHDNALLNNNQSGFRKHRSCTSAILKIANDIREYADNSNVTLLVLLDYSKAFDTVNHNVLCAKLVNQFKFSKTAVKLMTSYLQNRRQSVVVSNVSSSFAFTKRGVPQGSVLGPLLFTLYVNDLPSMLSSCDVHMYADDVQMYVSRPLNRINECVDICNNELVKISNWAKENGLGLNPSKSKCIIIYKKKLSLNIGPLLLNDSPIEYVERATNLGFIFNNTLNWSDHINTAVGKTYGLLRSLYLVRNFLPLNVRMLLAKSCLIPTLFYGIELFANCDSNSQHKLKMAFNSITRFVFNLRRFDHVTRLSYNIFELHLADWIKMRVLVYLQKIIFSKLPIYLYETLRFSTSRRSNIIIQIRH

SEQ ID NO: 2906 - protein, 966 aa, synthetic construct
  source 1..966: note = Description of Artificial Sequence: Synthetic polypeptide
SSGPRASDSFNQRSKKLNNSFSLHYQNVRSLLGKLSKLHVNSVSFDANVIAFTETWLNSSVSDCEIFAGSYVIYRCDRSMRLGGGVLIAVKSDLVSQRIPIIGTDSILEFVAVRIKLHDYFVFISCSYIPPRSDISLYLQHLAQIQSIHSTLGYNDHLIVMGDFNLPDISWMTSTDSIALVPTTAHEFVHGLIDLSLGQLNSILNCSKKVLDLIFVSEFANAFVTRISPLSNPEDAYHPTLEVTLEASAPLQSCSEIEPASFRCFRRAKFAELNRHLSELDWSFMDSNDDPLHIVEQFYGILYSAFDTFVPSFPSANAPQKPPWFSRRLSFLKNSMSRLFKKFKRTGLQVDHSMYLIARSNFLVHNSVCYNGYLNRCRIEFQDNPKQFYAFVNSKRKSQQFPSCLHLDTTSASSDADIANLFAKFFQSTYSSFSYDNTSSYPYPFLTPTVIFTPLISEDDVLQNLKTIKMSFSSGPDLVPSCVIKKCADALCKPLSKLFQISLLHSFFPEVWKESFIIPLHKKGSKSDIKNYRGIAKLSAIPKFFEQLITAQLQHQCSSVMSPTQHGFMKRRSTTTNLLEFTSVIRSAFKNNIQTDVIFTDFSKAFDSVNHQLLLKKLTLLGFPIMLTKWISTYLSNRTQRVAFKSTISNSVHVNSGVPQGSHLGPLLFGIFINDLPQVVLSSYVMMYADDVKLCLPLSNPNSHDLLQADLNNLHSWCIQNLLFLNNSKCKLMSFYRKRLLLTSYSIGSNDLERINSVTDLGVLFNHNLNFSDHIGTIVSKAKGVFAFVKRWSKEFEDPYTTKHLYISLVRPILEYCSCVWSPQYTNHQDLIESVQKQFLLFALRGLNWETHRHLPSYVDRLRLLNLPSLKDRRTCHGVMFLHKLITGLVNSSYLLGQIRFSIPVRSTRYFRPIALDICKTNFEVHDPFRVLCSQYNELYFLIYSECSVNLIVTNILTHLSLPPPT

SEQ ID NO: 2907 - protein, 998 aa, synthetic construct
  source 1..998: note = Description of Artificial Sequence: Synthetic polypeptide
MMRLIQLNLNHCTAAQDLLVQTVRERRVELALLSEPYRTPASPDWAFDRTKKAAIWRCSRETQQITDVLSDIGFVRARVGRWWVYSVYLAPSLTLIAFSRALDRLAADARGRTQVLIAGDFNAWSESWGSSTTNARGRMVLEAFATLDLALLNHGNRHTFRRAGLGSVVDLTFTSGSSYRLARWRLSEDYTGSDHLAIICDLGSPPSSQAQTPAQARIKYKTDSLDTQVFREQFLPTASRQGAELTAVELMRRLKAACDASMQSSRPHSRQRAPVYWWNQEIETARRECLSARRRYQRARGAESFAERQSEYRARRKTLKLAIRESKRKCFLDLCDSADSDPWGSAYKVVVKKAYTRTPKLLDPAMLRSVAEHLFPVMDGLRPADPATGDHVDSDATVSSDEILELAKLLKDGKAPGPDGIPNRALRLALHLQPDSFAKAFTKCLEEGVFPSCWKIQKLLLLPKPGKPPEEPSSFRPICLIDGTGKLLEKLVCIRLERAIADAGDLSRSQFGFRKARSTVDAVNRVVEVAAQAIDGTRWKGGSKEYCLMVTLDIRNAFNTARWDRILEALIGFSVPAYLVRIIRSYFSDRVLLCESSEGVFRHQVTGGVPQGSVLGPLLWNTMYDGILRLPLVGRSEIVGFADDVALLVVDKYPGKAEESCNQNIRAIEHWLSSMGLELAPEKTEAVLISSRKAVETATVEVGCTKVSSSRAIKYLGVMIDTRLSFREHLAYANSKAAGVNRALSNIMLNSRGPKQASRRLLTSVTRATMLYAAPVWAKALGTESYAQGLNATHRLSALRVCCAFRTVSNAAALVIAGIPPLDLLAKENEVVFNQTHGRRLSPGVKKAIRAEARQHTLETWQHRWTNEPKGRWTQQLIPNLKPWLERKHGDITFHLTQLISGHGCFRSYLMRFGHEDADDCPWCGGGRSETAEHVLFSCVKYARERSSLETVLGGRLNADNLVPFMLQGEAEWQAVNSFAAAITTELRRAERARRVHE

SEQ ID NO: 2908 - protein, 1029 aa, synthetic construct
  source 1..1029: note = Description of Artificial Sequence: Synthetic polypeptide
  VARIANT 910: note = Any amino acid
LRRLPHLPRPKPQNNYQPNCPTHLSKSHRNRLYTKCSHSPNPLKWHPCKYDNCCPIYCPPVYKWTHENFHKLFSHFETLLDGKSNFILSGDCNSKHRCWGNYSSCARGRSLMQAIMANKLLDVVATGQATHFPFDRRKQPSALDFAICKGLRRRITRTFSSDDLSSDHLPIQIILDLEEANLQLKKVSNSILKRNTNMEKFKRILEDKMLLNTEIRTGQDIDDCIDIFLNNIKTAANEATPKNRPFTNPRENSRRRENNLSLDEATTRLLDEKKELNRILRAAGTEEAKKWFKSAQNKLAKEIRKLRTSQINNELQLIDTTDRYRMQKLWKWTNNVKKQPQPIWPLKKDDDCISMRTASPWTRTLDERAEAFASHLESRFKANLRNSIEDREIIKKELDKFKSLKPRIETGTSGLKPVTLAELDLLIKSLESKKAPGADNISNKVISNLPKKARIYLILIYNKILNTGHFPKKWKHACITMILKPGKSPSLLNSYRPISLLSGLSKIFERIILNRLYNIESFSKAIPNHQFGFRKGHGAEHQLARVTQFILKAYEDKEVCSATFLDITEAFDRVWHDGLLLKLTKLIPKQLFNVLESYLTGRTFQVRINNETCSRIGTINAGVPQGSILGPVLYSIYTSDMPFPIIKGYIRNISLPDYHPKNIILATYADDTIIISRSNNTRSAININQTYINKFCRWAKKWDIAINGKKTGHVLFSLKNISENVHTTPIVDGQRAIKLCKHGYLGVMLDRRLTFGAHLILLKGKIIAAYKRLEWLLGKNSHLPKRTKLLLWKQIISPIWHYAIAIWGSLTSATQTKKIQTLENKLIRRIIKANRYTKQSAIREKYKIKSFEEVFDQASKRYANSIADHENPLIKELLTKSFKPIRLAASRTRYVNQYTKYLLPLLQNIXKPPDEPTYKSLYSYTDKEELEIVSKIRYDYRQTLPTLLQLEDEEMEARDCKAEEERKEREKEERKKALEKGPPDRWCELLINKFSKMYKKGMITRERVIELMLGQPPTVIKLVIPDYEP

SEQ ID NO: 2909 - protein, 861 aa, synthetic construct
  source 1..861: note = Description of Artificial Sequence: Synthetic polypeptide
MSTTGKKEIRKEIGREEQPSEEDTKEFLNKIYNRGKRIKKENERIKEIIEESNRRNLKRIIITKENIENVITRIPSWKAPGIENMHGYYWKRLESVRDRLVIVFNEWLDTPENIPIEMLTGRTILIHKGGDSKKAENYRPITCLNVIMKIFTSIINRKIEEQLANNEEKYQINKSQYGNKKRSLAAKEVNINSLLERNEREVQKKRYLESFYDIRKAYDTVNDEWLENVLRYFKIPFQITELIKSMSSRWRIRIGYRYKEEIREVKIKNGILQGDSISPLLFILQMNIISDVIDRTNEKRLKVKHVLYMDDIKVTSETKKGMEMVHKNIIETIEVIGMEVNVNKSGVMKKGNIGIQDNMKDIPIVDSEHQYKYLGVYQFTRNDDVGCIERISKSIEEGIKENNKGNDSSMNYINRINTEIIPKFTYSASVVKLPIMKLIEIDKMIRIEVKEGKIIGAGMCTSRLYVNRNKMGDGLKSIRDEYAIKLIRSILYYTWKRGNRIGDMIGINENKNRMLNRLYKSMLKKRINKEEFRKIVEEERGKRDKNRIIKYVREKFQEDYINKWRNKKVNSEILKGFEDKTMEQKKTIKVWKGINVIRKAYIQIKKMEEKARNVGVRKALMKHDMRYAICPICNKIATINHILLNCIVTKKTQMNKHDRIGEYIWRSLKIKYQLYENKEKMKMREEENTKKLIIRKEELGKNERRIEKDKILIVWNHEVVNRSEDKFHKRIDIYVRDLNKKEAMIIDMTIVRDKNISKAFTDKINMYSKLHEHIRKIERLVRVIVIPVVITVSGLINKETVILLNAEGIEIPREIMTREIVISNMKDLMRYCGDHSGEYSNVEIPEEEDSQESEGREEILT

SEQ ID NO: 2910 - protein, 982 aa, synthetic construct
  source 1..982: note = Description of Artificial Sequence: Synthetic polypeptide
MVQNNPMYKRGRGGVTLPGGSPGPPSGARPRGRARRRAPGGRVCHGARSGIARKSNVAPPSPSYGPTTHGRNRWGRVRCHMGGSEGQGPRRTRPGRQGLALGTWNVTSLWGKEPELVREVERYQLDLVGLTSTHSLGSGTVLLDRGWTLFFSGVAQGVRRRAGVGILTSPRLSAAMLEFTPVDERVASLRLRVVGGGISDCCLCICPEQQFGVFGLLGDPEWSPVWGSSRGLHNSAGGLQRTRGQFCDRVIGSETACFGHSGKERGGAVNRSPSGGELGQGVGEDSGQTGKTQTGSAGELGTSGGGPRPKDLHSHLRRSFSGIPVEVGGIEPEWSMFKASIAEAAAGSCGLKVLGASRGGNPRTPWWTPVVREAVRLKKEAFRDMLSRRTPETVAVYRQTRRAATSAVKEAKQRVWEEFGEAMEKDFRSAPRCFWKTVRHLRRGKRGTIQAVYSKDGTLLTSTEEVIGRWKEHFEELLNPTNTPSIVEAELEADGEASSISMAEVTEVVKQLHSGKAPGIDEIRPEMLKALGVEGMSWMTRLFNIAWESGKVPKEWRTGVVVPLFKKGDQRVCANYRGITLLSLPGKVYSKVLERRVRQIVEPQIEEEQCGFRPGRGTTDQLFTLARILEGAWEYAHPVYMCFVDLEKAYDRVPREILWEVLREYGVRRSLLRAIQSLYVQSESCVRVLGSKSDSFQVGVGLRQGCALSPILFVTFMDRISRRSRGGEGLQFGGLGISSLLFADDVVLMASSVCDLQHSLDRFAAECEAVGMRISTSKSEAMVLSRKPMECLLRVGNEALPQVKEFKYLGVLFASEGTMEREIGRRIGAAGAVLHSLYRTVVTKRELSRKAKLSIYRSIFLPTLTYGHEGWVMTERTRSRVQAAEMGFLRRVAGFSLRDRVRSSAIREELGVEPLLLCIERSQLRWFGHLVRMPPGRLPREVFQARPAGRRPRGRPRTRWRDYISTLAWERLGIPQSELANV

SEQ ID NO: 2911 - protein, 1080 aa, synthetic construct
  source 1..1080: note = Description of Artificial Sequence: Synthetic polypeptide
MMTPTSTTAANLSTHDDQHCPISTCPGASNTDQWILCDHCQKWYHTACVAVVIIPEEEWLCPTCVISVTSSQSQVTPSSLNTTTTTKKKHIIATTQYWLKSNLVEDPLGLIPKSEIVARYAHHIQTSGEGRVVDATVGKYILQLFPSTKFSRPPTRGAANAYIGIRWKDQPPLLPHAPRNWGAELSQLKNTVPTLRRVPKGARMEVAKALAKIIEEVTTTNSEESWFKLFSFPYAVVPVPTKSDKVKNLTTWVKSRVLQWSITQIVTPSRPRPQFAKPSRPQETIAKKVEAKLADGDVRGAIRLLTSDDTIAPNNQETLDALITKHPPHPEPTYFPNAPDKAEVLAPVDPKEVLIAISSFAPGSAGGLDSLRPQILKDLVISENGEPATNLLNAMLKFLDLVLRGDVPKSICPIFFGASMTALRKKTGGIRPVAVGNTWRRLISKIAVARMSSTLVEIFSPHQLGVGIKGGAEAAAHAARIYWNYSHDSPKAFLKLDFRNAFNEIRRDTLLQIIREKFPNFYRFVSQAYSSPSEIFFAGTPISSLCGVQQGDPLGPALYALVIQPIVDLIDTELNMWYLDDSTIADSPEKVLMAMQTITRMGTEVGLHLNTTKCEVGILGVVDDQTRDEIFELFRSTAPGIQKISPESAMLLGVPLTDEAIPTILGAKTEEMEKISTRLLKLSSHSAFFLLRASISTPRLIYFLRCAPTWRRFDALTLYDAKLKNAMEGIINCSLSPQSWLQSSLPVNKGGLGVRHAIDVAIPCFLASIYSSLPLAERLLPPHLHGIDTAIQEGEERWKSLGSSPLPPLEIRGIQAIWEIPQQEGVINHLTTNATTLEDKARYHAMSQPNVGAWLNAIPSPQLGTHLPNETFRIAAALRLGCDICQPHKCSCGEQVSTKGYHGLSCKNSAGRHSRHAAANDVIARALRSAGVPIIKEPAGCAREDGKRPDGLTLIPWARGKSVVWDFTCSDTFAPSYLPQTSIRPGVAAEKAEDRKKKRYEQLMDSFLFVPIAIETTGIWGKDGLSFIKEIGSRITNITEEKRATSFLLQRMSITVQRGNVASILGSLPKGHKLEEIFML

SEQ ID NO: 2912 - protein, 877 aa, synthetic construct
  source 1..877: note = Description of Artificial Sequence: Synthetic polypeptide
MRRDRDFSTSSVLCFTETWLCGSIPDSALQLAGFQLLRADRDTELSGKTKGGGICFYFNNSWCNDVTVILQHCSPDLETFFINCKPFYSPREFASFILVGVYMPPAGNVHEAQRTLADQIRRVERTNPDSLVIVLGDFNKGNLTHELPKYRQFIKCPTREENTLDHCYTTVSRAYHAVPRAALGHSDHVMVHLIPAYRQKLKLCKPAVREFKKWTSEALEDLRACFDCTDWDVFRTATDSLDEFTEAVTSYIGFCEDSCVPSCTRVSYNNDKPWFTAELRTLRLQKDQAFRSGDKDLYTEAKYKFSKAVRDAKRLYSEKLQQQFSASDSASVWRGLKHLTNYKPKTPHSMNDLRLADELNEFYCRFERQCPDPIPHSSTNLLQSPSPPSPSPSGAHASSSISPSPPPPATTLSILERDVNRLFRRLNPRKAAGPDSVSPHSLKHCADQLSPVFTDIFNTSLETCHVPACFKASTIIPVPKKPRITGLNDYRPVALTSVVMKSFERLVLTHLKSLTDPLLDPLQFAYRANRSVDDAVNMALHYILQHLDSPGTYARILFVDFSSAFNTIIPSLLQDKLSQLHVPDSTCKWITDFLSDRKQHVKLGKHVSASRTISTGSPQGCVLSPLLFSLYTNSCTSSHQSVKLLKFADDTTLIGLISGGDESAYRWESDHLVSWCSQNNLELNALKTVEMVVDFRRNRAPPSPITLCDSPVTIVDSFRFLGSIITQDLKWELNISSITKKAQQRLFFLRQLKKFNLPKTMMVHFYTAIIESILCSSITVWYAAATAKDKGRLQRVIRSAERVIGCNLPSLQDLFASRSLKRAKKIAADPSHPGQKLFVPLPSGRRLRSIRTKTSRHTNSFFPSAVGLINRARSPTA

SEQ ID NO: 2913 - protein, 1060 aa, synthetic construct
  source 1..1060: note = Description of Artificial Sequence: Synthetic polypeptide
MKKRKREGVTRPGGSPGPPFGARPRWRARQRASGGRVYRGARPGTARRSDAAAQHSTPHGLTTCGGNRWGRVRCYKGGSDSGGSRRNRPGRQMLALGTWNVTSLGGKEPELVREVERYQLDLVGLTSTHSLGSGTKLLDRGWTLFYSGVAHGVRRQAGVGILISPRLSAATLEFTPVDKRVASLRLRVVGGKTLTVVCAYAPNSSSEYSAFLETLNGVLHGAPVGDSIVLLGDFNAHVGDDGDNWRGVIGRNGLPDLNPSGCLLLDFCASHGLSITNTMFEHKDVHKCTWYQSTLGQRSMIDFVIVSSDLRPHVLDTRVKRGAELSTDHHLVVSWVRGWGKTRDRPGKPKRVVRVNWERLEEAPVQKIFNSHLRRSFSHIPVEVGDIEPEWSMFKTSIAEAAAVSCGLKVLGASRGGNPRTPWWTPVVREAVRLKKEAFRVMISGGTPEAVAVYRQARRAAASAVMEAKQRVWEEFGVTMEKDFRSAPKCFWKTIRHLRRGKRGTIQAVYSKDGTLLTATEEVIGRWKEHFEELLNPTTTPSLVEAELEAEEGSSSISLVEVTEVVKQLRSGKAPGIDEIRPEMLKAMGVGGLSWMTRLFNIAWKSGTVPKEWQIGVVVPLFKKGDQRVCANYRGITLLSLPGKVYSKVLERRVRPIVEPRIEEEQCGFRPGRGTTDQLFTLSRIIEGAWEYAQPVYMCFVDLEKAYDRVPREILWEVLREYGVRGSLLGAIQSLYAQSESCVRVLGSKSKAFPVGVGLRQGCALSPILFVVFMDRISRRSRGEEGLQFGGLRISSLLFADDVVLMASSVCDLQLSLERFAVECEAVGMRISTSKSEAMVLSRKPMDCLLQVGNVSLPQVKEFKYLGVLFTSEGKMECEFGRRIGAAGAVLHSLYRTVVTKRELSRKAKLSIYRSIFVPTLTYGHEGWVMTERTRSRVQAAEMGFLRRVAGVSLRDRVRSSAIREELGVEPLLLCVERSQLRWFGHLVRMPPGRLPREVFQARPAGKRPRGRPRTRWRDYISALAWERLGIPQSELVDVAREREVWGPLLELLPPRPDPG

SEQ ID NO: 2914 - protein, 962 aa, synthetic construct
  source 1..962: note = Description of Artificial Sequence: Synthetic polypeptide
  VARIANT 3: note = Any amino acid
  VARIANT 6: note = Any amino acid
  VARIANT 9: note = Any amino acid
  VARIANT 10: note = Any amino acid
  VARIANT 19: note = Any amino acid
  VARIANT 34: note = Any amino acid
  VARIANT 43: note = Any amino acid
  VARIANT 59: note = Any amino acid
  VARIANT 86: note = Any amino acid
  VARIANT 147: note = Any amino acid
  VARIANT 192: note = Any amino acid
LDXRHXGIXXVQEGSYWKXGGVALYVKEHYTSLXVKIGCKEGXLETLWVKIRGERREEXLIVGVYYRPLTKNSLENWQRLHGIMGXFNYPDISWDEYSARSDRSQSFLTCIEELYLTQEVYEPTRGKALLDLVLAKGDDLVSNLRIXGKLGNSDHEMITFSIHCKPGKSASRVEIPDFRKADFHKLRRLVGXGLRSNEEGNTRRVVFPQGSNPKSSKKVYSLSQERQQKSWETPLAQQGSHGPPEIKARSLQGMEVRNNYQRGVLSSCPHLKSLILGKLISTNSGDWLVRDYGPMRKGIQEEWSFLKEAILKAQRKSIPSHKKGSKRAGRPPWLNREVMDLLKLKREAYKGWKSGTTTKEEYSAAARTCREQIRTAKALTEHKLATRIKDNKKSFFRYVGSCKRNKGSIGPLINEMGRLLTDTQDKTELLNEYFMSVFHQSKGISLLDRIQDDHGGGDHPPIVDVDLVGEHLQRLNIYKSAGPDELHPRVLKELADVIAQPMAKLFEDSWHSGEVPEDWKKANVVPIFKKGRREDPGNYRPISLTSIPGKILEKIIKETITHRLTEGSILKGSQHGFIMGRSCQTNLISFYDQVTCHLDRGNEVDVIYLDFKKAFDLVSHDVLMVKLGKCGLDYFMVWWLGNWLCGRTQRVLIDGTESSWQRVTSGIPQGSVLGPVLFNMFINDLDSGITSNLAKFADDTKLWGSVVTLKDRLAIQADLDRLMKWADLNLMSFNTEKCKVLHLGRNNPQHTYRLGSALLASTTTERDLGVMTDNKMNMSHQCDAVAGRANQTLACIHRGILSKAKDVILPLYSALVRPQLEYCVQFWVLHFKKDVEKLKRVQRRATCMIRGLETKTYEERLRDLGLFSLEKRRLRGDLVAAYKYIRGVHQGLGEHLFTKAPQGRTRNNGHKLIEDRFRLDIRKNFFTSRVPRVWNRLPPEVVQSSTLAIFKKRLDAHLAGII

SEQ ID NO: 2915 - protein, 729 aa, synthetic construct
  source 1..729: note = Description of Artificial Sequence: Synthetic polypeptide
LVRGLRVLDPLGDSDHCLLEFTIQRKVAKASSQVVALDFRRANFNELRRIVGEALKTQRGGEPGVQGEWSLLKETILQAQRKVIPRRVKGGRRAYKPPWLTKNIRECLLAKKEAYSQWKGGVITKEDYSAVARGCRGMVRKAKAEMEQGLASRIKDNKKSFFKYIGSRKKAPGNVGPLQDKTGNLVVTPDDKANIFNNFFASVFLSKDQNCHLPAGPPLGPGGGSPGPRVSEDLVRELLEGLDVFKSAGPDDLHPRVLKELAGVIASPLARLYEHSWCSGEVPEDWKRANVVPIFKKGRKEDPGNYRPVSLTSILGKLFEKIILAHIQEGPAGNGMLRGNQHGFISGRSCQTNLVAFYDQVTKSLDAGVAVDIVFLDFRKAFDTVSHPILIRKLGDCGVDTHTVQWVANWLESRTQRVVVDGSFSTWKDVGSGVPQGSVLGPALFNIFISDLDEGVQSTLFKFADDTKMWGDVGTIEGSNRLQLDLDRLQGWAEENRMGFNTDKCKVMHLGRNNRHHTYRLGNSPLVSTEVEKDLGVIIDSKMNMSRQCGEAARKANCTLSCIHRCISSRSKEVILPLYAALVRPQLEYCVQFWAPHFKRDVDSIERVQRRATRMIKGQQGRSYEERLRDLNLFSLQKRRLRGDLVACYKLVRGDQQALGESLFPRAPQGVTRNNGHKLAEGRFKLDIRRRYFTVRAARVWNQLPSEVVQAPTLGVFKRRLDDHLTGVI

SEQ ID NO: 2916 - protein, 666 aa, synthetic construct
  source 1..666: note = Description of Artificial Sequence: Synthetic polypeptide
MGVQDGWSFLKETILRAQRESVPMHTKGGKSAKKPPWLSKGIQECLRAKKEAYIRWKQGAITKEDHTSVARGCRAAVRKAKAEMELGLVTRIKDNKKSFFKYIGSKKAAPGNVGPLQDALGNLVIAANEKADLFNKFFASIFLSRDRDISPTGSTEGLRGGTARPKVRDDVVRELLEGLDVFKSAGPDALHPRVLRELAGVIAGPLARLYEHSWSSGQVPDDWKKANVVPIYKKGRKEDPGNYRPVSLTSVLGKIFEKIIKEHICEGPAGEIMLRGNQHGFIKGRSCQTNLISFYDQVTKSLDEGVGVDVIFLDFKKAFDTVSHPILIKKLGDCGIDAYTVRWVANWLDGRTQRVVVDGSFSTWRDVGSGVPQGSVLGPVLFNIFINDLDEGVESTLSKFADDTKMWGEVGTPEGRDRIQLDLDRLQRWADENRMEFNADKCRVLHLGRRNQQHTYRLGNTLLISTEAERDLGVIVDSRLNMSRQCEEAVSKANRTLSCIHRCITSRSREVILPLYAALVRPQLEYCVQFWAPHFKRDVASIERVQRRATRMIRGQQGRPYEERLEGLNLFSLHKRRLRGDLVAVYKFTRGDQQGIGDALFPRAPHGVTRNNGHKLIESRFRLDIRRHYFMVRVARTWNQLPREVVLAPTLGVFKRRLDRHLTGVI

SEQ ID NO: 2917 - protein, 1318 aa, synthetic construct
  source 1..1318: note = Description of Artificial Sequence: Synthetic polypeptide
MKFMCWNCRGLGNPAKLRELKQLIAANNPDLIFLSETKMSANDFRRVQNKCRMQNGLAVNSEGRSGGLALMWRDGMNVSIQNYSKHHIDSMVKLENNDNIRVTGFYGHANPNLRSSSWDILRRVGESVREEWIVGGDFNAILNDAEKEGGRRGVRAQMNEFKEVMDDLALVDIKPDSGWFTWVNNRRGGVTWGGLIKERIDRFISSVSVAEKFPFISTKVVRQTQSDHDAIILDLWGRKPKAYPTDKRLCFKFDVCWAGDVEAKNVIERAWNRAATDFGEKIERVRLALGPWQRKKYGNLKRDMQKLEKHIDWIIDSVSSEESGRTLKETRRRLDFLYAREESYWAQRSRSIWLREGDRNTRYFHAKATGRLKKNVIEKLQNAEGQWVTNSEDINKVAKDYFVKLFRSNGQNANTQEMGFIKDCVTRETNEWLCMDYTEKEVLQAIKQMDPNKAPGIDGLSGSFFKHHWDIVGKDTISYCLEVLNGNKNISSVNETMIILIPKIKNPCELTNFRPISLCRFVYKIISKVLANRLKAALPSCISQNQSAFVPGRMIHDNVLIAHELLHYLQSSKNGPNKGLVVKLDMSKAYDRVEWNFIENVMKKMGFVDKWIAKIMECVRSVTYTVKCNNTLSDIFVPERGLRQGDPLSPYLFLFCMEAFSRMLIHAQENNTLRGIRASRNGPRINHLFFADDALLFVRNKRSDIECLVTMLDIFSNISGQEINFDKSMILFSPNTPRAQRILFSDLLGMTVVEKLNNYLGLPIPIGKKKTEAFKEITNRMSCRINSWTKRLLSFEGKEVFIKAVLQSIPTYAMSIFLAPKGIIDDIQAMLSRTWWSGKDKGGFWTMIPWKTLCKPKGMGGLGFRDVRLFNLALLGRQVWRLLNNTDSLCFKVLSSKYFPDGNIFHAKKVDKASFTWSSIAKAVEAFQDGFGWQVGNGEKINIWADNWGMEGLNGAAVISNTLNHSEKFVKDLWHLDRRSWDENKVKQAYGQDWGDKICDIPIGDEVQEDKIIWFHNTHGCFTSKSAYSWLLLKEMGCGPHRFFWRALWKLDTLPKVRVFTWRVGHEILPTNGKIASIRPGFNKGCPRCGAEVETLLHALRDCPTSRAVLSIGGWSRSFISKSYDHCIDWLEDLMRVLDKRAMADLMTILWNCWNNRNNFIFRGKEEEAQLIWERASNLSKEFRICNMLHAPLISQNIAEKRWVKPPKGFLKINFDATVGETGIGYGTVIRDEEGFVLGGGGGFKEGRRSVEEAECVAFEQSIDVACKLNIKDHVLFETDHAGLVNRINNLANDVTIIGARLKDCTVAFTFFKSASLI

SEQ ID NO: 2918 - protein, 1164 aa, synthetic construct
  source 1..1164: note = Description of Artificial Sequence: Synthetic polypeptide
  VARIANT 1036: note = Ile or Leu
MQRMSELGAGLGVVAEPYWVPVRSVNWFGSPDGSVAMVANPAAGTPPCVFRENGSSYVAVDWGPITVVGVYLPHHRNKAGLGELAPVKRVLDRIGELVRRCHPRPVVIAGDFNAHSEGWGCSPRQRDPRGEAVIGWAAGLGLLLMNRGSTSTCVRPGGQSVIDLTWATPSAAGLFQEWRVEAEGESLSDHRHIAWALRLPKPARVLARCPGEGNFPLPKRWALNRLDTDRFRAAVLAATWHLDVGPGEWDPSPAEGAGEIVGIVASACDAAMPQSHPRRRRATYWWTEELENLRDSSVQARRRYYRARRRGGDVAGTKEGYLRAREALKAAIVEAKRAAWEQMVSSLDDDPWGRPYKRVMGKIRPWAPPPTESLDRQALEGLLDALFPRAEGGPPEIPTPPLGEGDWDEGLAVSPEELTAARRRLGAKGKAPGPDGIPGRAWALALGEGNLSAATCRVLSGCLREGVFPPEWRRAKLVLLPKEGKAPGSASAYRPICLLDEAGKMLERIVADRLVQHLSSKGPNLHDRQYGFRPGRSTLDAIQCFRDLTRAVVEEEGGVLLAVSLDITNAFNTLPWPEIGRALEHHGVPVYLRRILSAYFGGRDLAFPVEGGVQGRRAMERGVPQGSVLGPLLWDIAFDRVLRTPLPPGCHVVCYADDTLVVAGGRAGGKPASERRRHWHRWWEPSETWVSRWRPKRPRPCSFTAGVGGRRRRPGSSPGGELGGSPPPSGDGIGIGGGNHQRPGSQGGAPKDPGRVLSRQGSGGAAGDPGPRRWRPRPRRADDEISRPDAGQPMELRTPLQGTGPQGAQGRTGCSQPDAHPRGPRLEGSPPVRHGGALDRPVRGAHMGATAGGLPRRKARAAAGPEARANQGDSGVPYRVVHGGDHPGRRPPCGAPRRGEAPPLLEGEGAPRGGEPVGQGPEGSEAPGRGPDPGEVEGLAVRPPGARASDGRGCPPLPVRVAGRRGRGLSFRLAQVLTGHGCFGRYLRRIGKELTTRCHHCPALEDTAHHTLAACPAWAGERRVLAGAVGCREGEXSLPRMVKAMCGSEEAWAAAVSFCEAVMSQKETAEWGRRPHRARGAAPGGRGTRQRARGGAGRGGLPDPRGPGAPSAARARHRSQGGSRGRRAAFPAFPPPSDRTSRDRGERCPGWGWARSPTNPPLPD

SEQ ID NO: 2919 - protein, 1030 aa, synthetic construct
  source 1..1030: note = Description of Artificial Sequence: Synthetic polypeptide
MDSTYRNDFEKISNLFQTNTFNLDNESDPDINYFNEINGSKFECSYFYPDKIKSIFKNNDNRDYFNIIHINIRSLKKNFDNFLNMICQTENFFNVICLTETWCTEEDFKSNSNLHLTGFNTVFLERNVNKRGGGVLFYIKENLAYNIRSDMSVSDDNIEILTVEIINKKSKNILLSCCYRPPTGRTEYLSNYLVHNIIEKTSQEKKKNYILGDFNLDCFQYNEKKYITKFYNHLFETGTIPIINKPTRITKSSSSLIDNVLTNDYFNITLKKGIIKTDVSDHFPIFFCLGADHKTNTNGKITLKKRIYSNNNLNLFKEQLLHQDWSYINFNEDINIIYKSFFNIFYKIYEANFPIREIVLNAKDISCPWITKGIKKSSKIKQKLYIKYLKNKSDKHKNNYTVYKNLFEKLRKKAKQIYYSDLLIKHKHNSRRVWQIMKEITSKHKTNTNTMPNAIKFENKLITDSNEIAAEFNNFFSSIGHNLSNKIPYVDNNSVDEFISSPNSTINFSNLTYNEFEIAFKSLKRNKAIGPDDINGNIVIDSFNEIKDILFKVFKASITQGSFPNSLKIAKVTPIFKTGDHTNITNYRPISVLPVFSKILERIMYNRIYTYLIDNKLLYKNQFGFQRNSSTEHAILQVTRSIADSFKNSQFTLGIFIDLSKAFDTVNHHILIKKLESYGIKDKTLNWFKSYLSNRKQFVYNKESSSQIIKNITCGVPQGSILGPLLFLLYINDLYKASTLTTVNFADDTNLFQSHENIEILFNNMNNELKRISYWFRKNKLSLNTDKTKFILFHPTSKKKRIQNILPDLFIDNTIIKREKFTKFLGVIIDENLSWSQQIDSISMKVAKNIGVLYKARYILNKKQLTQLYYSFIHCHINYANIIWGSAHKTKLKSLYRHQKHAARIINFGNRFSSSTPLLIEMKALNIYELNIFNILCFMFKCKENLSPSVFINLYNLKPKNKYELRDSKNIQEPFCKTKIDQFCISYRGPFLWNKIVLPNFDFSFKWSYSSFKKKTKEIIFSTQNIFIYF

SEQ ID NO: 2920 - protein, 1206 aa, synthetic construct
  source 1..1206: note = Description of Artificial Sequence: Synthetic polypeptide
  VARIANT 239: note = Any amino acid
MVRKEDFEALVSRVLKLEAELQIKDKEINDLKIVVNDMKNQSKLVSNSNDVSNTWSDVVKGRKKNTSVQLDLLNVVVKESHDREIRQKNLVVFGFKTSTNKDESVAKEDDKQELQNLFKQINVKVTIQRVFKLNTKTDKPPPVIVVLTNKEERNAVLKTAKNLRNSPETNNIFINADMTEAERFKMKALREERAKLNEANQDLKYYYGIRNERVVKLLKKLYESTQPYQQISPKKVLYXNLNNITKNPNDRHLLNSNKRLIVYYTNSTSLNNKKNDFRALIDIEKPDVFAVTETWYTPLSDVNIEGYVIYRNDRLNGKKGGGVCIYVNSSIKSYEISNIELKSDLIEQIWTWIEYGQEKVLLGCIYRPPDSSCVTNKNIINSIIAAKRAQDKKQFTSIIITGDFNYNTLKWKDSVEESHSQQAEDFVACLNDCFFEQCVTEATFQSNENELTNILDLVIVDDSNRIFGLSHLPPLGLSSKGHHILKWFYKMKDRIDDFSSSTKKFAYRRGNYEKINVYIKSINWADEFQNKCIDKCYDKFLYHYNQSCKNYIPIVKLKNKASEVWMSNSLRKEIKYKNNYWTTNKKMNWSIAGSKEKYNKMKRNILKQINNSVKNYERNLVNQVKNEPKLLYSYIRKKQKVKNHIRALNDNIGSTMYDKHSIVDIFNKYFHSVYIKEENINDCNFEVQTNSRFGKIFVDQALVKSYLSKLDINKSSGYDEVNPYVLKVCSESFSIPLSIIYQQSLTNSDIPDLWKMANVSPIFKNGSKLQAINYRPVSLTSIPCKVLEKIISDNLKNYLESNNLFCKQQHGFLKGKNCITNLLESLDFLTYQLMIGNSIDILYTDFQKAFDRVPHKRLISKLCGYGIEKEMLNWIETYLSNRKQRVIIGDTKSDWLEVLSGVPQGSVLGPLLFLLYINDLPSKIKNKCELYADDNKIIAVVNNQVDSKSLQDDINNLTEWSDKWMINFNIKKCKIMHFGKHNKNFEYFIKDSKLDSTTNEKDIGLLISNTMKWNQHVNMVVNKANSRLGLLSKSFTYKDKNTMKILYCTFVRPILEYASPIWNPYNKNDIHKLEIVQQRATKLIPELRHLPYEERLKKLQLTSLKIRRLRYDLIQYYKIFHNLDKVCWYQQPKTAISISANGPASNIRGHKARVDIELIKRNRPRENFFTNRVAKWWNKLPEEIISAKSVNIFKDKLDKHMVIMKL

SEQ ID NO: 2921 - protein, 717 aa, synthetic construct
  source 1..717: note = Description of Artificial Sequence: Synthetic polypeptide
MMPIINKSTRITQHSCSAIDNIFTNTLFHSTFKSGIIRSDITDHFPVFAIFKKPKDLQKKDWYFKKRIFTTRAKNMFKLELSTVNWNFVFLETCANNSYDLFLDKFFNLYDKHFPNKIIRIKTKGLLNPWFTKSLLKSSKRKQKLYIRFINSKKERDKHNYLEHKRLYERTKKIARTTYFKNKLLELKGNCKKTWDAIKEILGKQKIHNKALPSVITVDGTQISDVKSVATKFNEFFVNIGPNLASKIKHTPAHFLSYLSKSDKSLAFKKLTSKELDDSIKKLNKNKATGYDAISASVIKDCYELIKDVLLDIFNKSLKTGVFPDKMKVAIITPIFKSGDESLVTNYRPISVLPVFSKILERIMYNRIFAFLYDNNLLYYNQYGFRSNYSTEHALMQLVEVISEASSHNKFTLGIFLDLSKAFDTVNHQILLEKLKYYGISHEYHKWFTSYLTDRKQFISLNDGFQTNKLKISCGVPQGSILGPLLFLIYVNDLYKASNTMSTIMFADDTTLFYSHSNIISLFQVANNELEQISNWLIANSLSLNADKTKFSLFHSKRKFQSIPKSLPMLYINNINIERSFTNKLLGILIDENLSWRDHINHISNKISRSIGILYKTRQILDKSTLTQLYFAFINSYLSYGNIVWGSTNKSKLDCLLKQQNHAARIIHFQNRFTNAKPLLKSMRALDIYELNIFQNYTIYVSTSVKKNAEGFRKYFP

SEQ ID NO: 2922 - protein, 1018 aa, synthetic construct
  source 1..1018: note = Description of Artificial Sequence: Synthetic polypeptide
  VARIANT 348: note = Any amino acid
  VARIANT 617: note = Any amino acid
MENNLSYNINAKNIVFSDNNSDNHTETLLQSEYYSIPESTQYLCENKNKFSILHINIRSMNKNFENFKCLLGELNHDFKIICFTETWLKSNETNSNFELRNYTSVHQMRDICVGGGISIYVHNSIDFIQRKDLNVNNTDCEALCVEIINKLAKNFIINAIYRTPAGSLKTFKTYLRTFLTTKNILQKHVYVVGDINIDLLNHALNSEAKTFIDILLEYNLIPTINKATRVTKKSSTLLDNVITNNFHNSRFKTGIIKTDLTDHFPIFFITESVTLNNATHKSTVFMRQINESSICQFKNLLNNYVDWNLVLQSHDVNNAYDLFLNQFSKMYDKAFPLKVKLINSKSVXSPWMTKGLLKSSRKKQKLYDKYLKNKTYKNETNYKNYKNLFEKTKKQSKVNYYAKLLEKNKGNPQKTWSVIRDLIGKNKIEKNNLPQKLIIEGKMIYHKEVIIEKLNNFFLDVGPNLAAKIPIGQKKFDSYLATTDLIMEEPILTKSELHTAFNSLKKNKSAGIDQINVNVIKSVFDIIEPSLFHIFNLSLKSGHIPDKLKIAKITPIFKSGDETNISNYRPISVLPCFSKLIERIMYNRLYKYLSENKILYNNQYGFKKNHSTDHAIXELVKHISNGFNSDCYTIGVFIDLSKAFDTVNHEILLKKLENYGVKNQSLLWFKSYLTNRKQFILKESKDSKNNLITCGVPQGSILGPLLFLLYINDLYLSSKVLNTILFADDTNLFYSHKDITVLFKIFNEELDKINEWFISNRLSLNVEKTKFILFHKPSKAENIPLKLPNLLINNKIIKRESTTNFLGVLLDEKLSWKFHIKYIEGKISKNIAMLYRTKPFLNNESLKNLYFSFIHSYLSYCNISWGSTNHAKLKKIYSKQKHACRIVFGANRKTQCEPLLRQLGALNIYKLNIHQVMIFMFKAKLGFSPVTFQSYFNEISHKYPTKFSVNNFVVPINFLKLSSYQIQYRGPLVWKEFLPIFSKKQNFVLNCTLQSFKDDSKRHLLNMEFDILDFKYLF

SEQ ID NO: 2923 - protein, 1089 aa, synthetic construct
  source 1..1089: note = Description of Artificial Sequence: Synthetic polypeptide
MKNKTLCIFCFKTVTDNHKAIYCDCCSSWVHAKCNQIDLLTYNLLSEDSSEWYCFNCISKNMPFGLLTDNELLTTLSCKNPQTASSNFLVSPIHSRNILKELNTISGSAINCKFYDVVDFNKAIKPNSDIYLHLNIASLPYHIDDLCSLISTLNIIPMAIGITESNLYLNDTNITDITINGFNIEHCPTEAKKGGALLYLQSNLNYVVRHDLKIYLPKLLESVFVEIIKPHKTNVLIGCIYRHPSMNQNEFNTTFLTPLLEKLSKEQKLIFLMGDFNVDLLSYSESNPTSNYLDTLCSYSFNPSIILPTRITTKSQTLIDNIFMNFYSSDHLSGNLTISISDHTAQFVCVPGTSNQPNKVKISRCLKRCLKKFDPNKFIIEISKINWELIIKKDDNINESINNFLKSFNRVLDQCAPYKTLTKNQIKLKSKPWISKGLLKSISVKNKLYKKFVRCKNINTKNELFTKFKFYRNKISNLLKSSKKSYYITYFNNNINNIKNTWKGIKDIINIKGSLHKTPTQLNLNENIITDHATVSNIFNNYFVSIREKLLNNIMPSEYTYSDFLNFPNANSFFIDPVSEDEVSSLISNTLKNDKSYGPNSIPTFFLKLTSHIISKPLSIMINNSFKNGKFPDVFKVAQVIPIYKAGSLLDFSNYRPISLLSNLSKLFEKAMHNRLYKFLDKFKCLYQHQYGFRSKHSTTLALIEITEKIRRALDNKHFACGVFVDLQKAFDTVDHSILLTKLEYYGIRGIPLKWFTSYLKNRTQFVSINSTKSDLQNCSNGVPQGSVLGPLLFLLFINDLNTSFKFATAYHFADDTNMLLVDKSLKKINKHINHDLGNLVQWLRSNKLSLNSNKTELIIFKSNLAPIKKQLNFRLSGQKIYPLDSIKYLGIKIDSNLSFQGHLNDLAMKLSRSNGMLAKVRHYVNLETLLNIYHAIFGSHLRYACQVWGQSHKQIILRLSHLQNKALKIIYFQYNNSKSNVLYLISKILKISDLVVFLNCLFVWNYHHKNLPLSFNNFFSITNCHYPLRSISSLNLVIPKHQSAKYGNKSIKYQCISSWNKLPPDLKSLNSISEFKIKLFNYLLKKYN

SEQ ID NO: 2924 - protein, 945 aa, synthetic construct
  source 1..945: note = Description of Artificial Sequence: Synthetic polypeptide
  VARIANT 87: note = Any amino acid
MSENSLYNLVSYKMISQPRVNSKGGGVAVYILDKFEFKKNNTFSKTNKHIETLCIEVLNTSGKSFLISSLYRPPCGKQVNFLNILKXFMSQMSKQNKHVFFAGDTNMDALSYEKFANIKNFFNLLFEFNIIPTIFKPTRITNQSSSVIDNILTNCSLNTKFESGLFIADFSDHFPVFHIAREVLSNIDNKKCFVTYRNLSIKKLKKNLNNFKNKLQVEQWDKVYSSTDPNIAFDHFSSTFQNIFDNVCPKITTEIKNKEYKNPWMTITLIKASKRKQKLYVKFLKSKNKEDEKIYKNYKKFFQHSMKEEKIRYFSNQLDKHKFDIKRTWAVINELTGREKKKHTCTCLPQKLISDKKNYNKYNKNMSRIFPIKKIITSTTKICQEFNKYFVNVGPSLASNIVQPNKTFDNFLGEKPTTSINNEKITKLEFNKAIIELKRNKSCGYDGISSNVAIYIMDSISKPLFYLISSSFENSIFPNKLKLAKINPILKKGDCNNVSNYRPISLLPVLSKVFERIIYNRVNNYFTLNNLLYKNQFGFQSKCSTEHAIIKLADKIFKSFDSDELVLGVFVDLSKAFDTVDHSILLSKLKYYGIIGSTFKWIQSYLSNRKQFVLLEKSGALDITCGVPQGSILGPLLFLIYINDMHKASQKISTIMYADDTNLFFNHPBAKTLFETMNIELEKFNLWFIANKLSLNCQKTSFTLFHKKKNNQLISLKKKQSINLPLKLPKLLINKNEIKREKCTKFLGVLFDENLSWRNHIGLLETKMSSVIGVLYKSRPFLDSKSRNMLYFSLVHSQLLYANIVWASTHKTKLLKLQSLQNHACKVINYLNRLVNPAPVMKSMMVLDIEKLNTLQILIFMYKYKNNLLPSVFSDIFLISFSEKYNLRSNTRYNYHLGKIKSHQSNFLITNRGPSIWNHFQNKNIKDLKSISSFKRETKMHLLNS

SEQ ID NO: 2925 - protein, 1087 aa, synthetic construct
  source 1..1087: note = Description of Artificial Sequence: Synthetic polypeptide
MKICHHCKFCNKKIKDNHRAIQCDCCSFWIHAKCIPVDKHAYNMLSNDSSEWFCPNCISNNMPFGVLSDLELKSTLSCKNPSNKIKFHEPPDYLKNLFKTMNNVFNPTTKCKYLDVNELNKSINPGTEIYLHLNISSLPFHINDLSSFVGTINTPPMVIGITESNLYANDSNITDITIQGYNIEHCPTESKKGGALLYLNSNLNYIVRSDLQIYATKFLESIFVEVIYPLKSNTIFGCIYRHPSLNITEFLSIHFNPLLEKLSHEAKNIVLMGDFNIDLLNYRESQVISNYFESLCSHSLFPTIILPTRVTAKTKTLIDNIFMNSFPTDIVSGNLTISISDHMAQFVCIPNNPPIKKKVKMFKRSFKKFDSDSFIQEISDINWELLIKDDDNINESINFFLKTFEKILDRYAPYKELTKKQIKLQSKPWITSGILKSISNKNILYKKFTRSKNVNTKNILFTKFKLYRNKISNLLRYSKKLYYASFFNNNINNVKNTWKGIKEIINIKPSTSTKSFNLKINENVISDHTSVANIFNNYFTTIQDELLKNTVPSKCAFGNFLKIPSINSFFIEPVTENEVANLIKDTLKNNKSLGPNSLPTFLLKLVSHIISKPLCTMMNNSFKNGIFPEAFKVAKVIPIHKMGSYLDYSNYRPISLLSNLSKLFEKAMFQRLEHFLEKHKFIYKHQYGFRNKHSTTHSLIEITEKIRQAIDNKHFACGVFIDIRKAFDTVEHTILLEKLKHYGIRGIPFLWFSSYLCNRTQFVSINGINSGLAKSFNGVPQGSVLGPLLFLIFINDLNVSLKFSTAYHFADDTNLLLINKSLKKLNKNMNHDLANVVQWLRSNKLSLNSKKTEIIIFKSAKTKINKQLNFRLSGQKINPVNSIKYLGIKIDSNLSFASHLQDLALKLSRSNGILAKIRHFVNHETLLNLYHAIFHSHLRYACQVWGQSKQLAFLRLTYLQNKALKLIYFQHTNSNCSILYFLSKVLKLCDLIQLSNCLFVWNQNHNNLPLTFINFFSYRENCKYILRSALNFKLSVPKYRTVHYGYESIQHKSIQTWNNLPSQLKSLKSFSKFKTALFNHFLEKYSL

SEQ ID NO: 2926 - protein, 931 aa, synthetic construct
  source 1..931: note = Description of Artificial Sequence: Synthetic polypeptide
  VARIANT 777: note = Any amino acid
  VARIANT 928: note = Any amino acid
MEGNIESKTFENISFCAYNCQSFKSNSIYISELVKSFDIIFLSEHWLLNIELFVLKNIALPTHKVFFHAAEKKAFGRPFGGNAFIIKKDVLLSPHIIYEDDNILAIKGKNKCHNLVFIGIYLTSCRNNEESLSKYEQQLNLITSIVKNYEDVSECIIAGDFQSYPETLYDSEIRNNKKRNKFSNHLTNFIKSNKLSFIDIISGAGPTYTYQHKTLSNSSYIDHIAALKESSLSFINTSVIPPSPFNFSDHLPIATNIVVTHTNLSTVINSIMHKYNYIPKYAWNNEKFINIYNHNLSVAFNYYTFNEEEIEQELKQTCEKIQNAALLAVKQCFKQQICKYSKSWWTTDLKKCKENLSFNYKQWQKSNYNKTQECIEYKRYIFSRKNFRKAVKAAHNKKIHEKTINIENLRTTNPQRFWDNIRKIKTKATTRLFTINKSQNIKDIVQEFRQHFQTLLNTPLITNNNHNPSQIPPLSKEPNSLIITSADIINCISQLNSNKSPDSCGLSAEHLKNSHNNNLLLWLAKFYNSILSNGKVPNDLSTSTIIPLVKSYKKSLNNPDNYRGISILPIFTKLLEYLILLICPSITDSHSHQFGFKKNSSTLHAEFLLSETVKHYKNNNTPLYMCSLDANKAFDTCNWDLLFEKLYFQKKLPLSVVHTISSLYHSGTANVSYQGVTSNQFSLSQGVRQGSILSPHLYNIYTESILNEIVSECKVGSTINGIYTGVIAYADDVILLSPTISGLQELINRFQTYGVANFIKLNTEKTEFLISGKSYIXNNVIKINGVSIYLQNKLKHLGFQWDNDTSKNKIATLQKTNLNERITQFQSVAKALIDSGIRYCQPSTIVHLYNTLTVPKLIYGLELCKYDTNFLSKIDAVGRAVLKSFFCISKYSKNYLHSFFKIEDISTILLRNKVNLFIRLLKNQTCLXTDN

SEQ ID NO: 2927 - protein, 694 aa, synthetic construct
  source 1..694: note = Description of Artificial Sequence: Synthetic polypeptide
  VARIANT 309: note = Ile or Leu
  VARIANT 529: note = Any amino acid
MIFLRFYIIFLNFNIALSYFLFKMADETVLTNLNFNSFESKKSILLNNYSDPDINFYNNDEVIKNINPLYYNPNSKNIANGMDDNSFSMLHINIRSIQKNFESLKQFLYKIKINFQIICLSETWCHDKNIENNSNFQLPNYKVIHQVRASNKEGGGLCIFIKNSLLYKVKPNLSSTTNDYESLCIEIINETSKNIIIHALYRPPSGSIKVFENHIKKIIKNKSSINKTVYFVGDINLNILDYDKNKNIKNFFNVIFQNSYIPLINKPTRITKESATSIDQIITNEFINKKIKTGIFKTDISDHFPIFIXSQKCIYNAQNKRKKIITTRLINDNSIKHFHNLLSCVNWDTLKLNLNABKAYDIFLTEFLKLYNKAFPEITKFIKTKTLLNPWITKGILKSSKKKQRLYNKFLKKKTLKNETDYKNYKRLFESILKRSKKHYYSEQLIKHKNDSQKTWQIIKEVIGKKNLYRNLLPKNLKFNNKYIVNKSLVAETLNQFFVNIGPTLASKIATTQLNFKSYLTSNNINVMXNYKLTEKELLDAVSLLKPNESLGFDDISSNVIIKSIKYITIPLLHIFNLSLKQGVFPEKLKIAKVIPIFKSGDPSNVANYRPISILPCFSKILERIMYNRLYSFLNINNILYNKQFGFKSGHSTDHAIIHLVHDIFKAFDEKKFTLGVFIDLSKAFDTVDHKILL

SEQ ID NO: 2928 - protein, 1027 aa, synthetic construct
  source 1..1027: note = Description of Artificial Sequence: Synthetic polypeptide
MALISDFETLVFNFFETKFFSLHENSDPDINYFHDTKIECSYYYPNELKGILFKNVNNDQIRILHVNIRSINCNFEKFQNLLEETKYFFNIICLTETWATSNDIKKNFNFYLSHFEMISLERQINKRGGGVLIYIHKDIKHCCRNDLSVSDGDGEILTIEIINERTKNILVSCCYRPPDGVSENLSMFLQQNVIAKGNNEKKKNFLVGDFNMNCFVYNDDNKVKNFYDTIFESGAIPLINRPTRITKNSATLLDNIITTDLFNNDIKLGILKTDISDHFPIFLTINTDQLPKQKLNKIVKKRFYTSSNIEAFKNQLSLLHWKHLNFNENANNLYEKFYETFISVYESNFPIVTITLKTKHFDNPWITKGFKKSSKTKQRLYIKYLKTKTPDSEKIYKDYKNLFEKIRKKLKKNYYSKLINKAKNDSKRTWQILKEITGKQKTCSSSLPQMLKVDNNSLHEPQIIAHEFNKYFTEIGSILSSKIQKTQTSFYDFLLPFDKNISSEELSAELSFDEFEKAFKSLKKNKAPGADEINGNIVIDCYEQLKNILFKIFRASIHQGIFPERLKLARVTPLHKEGDRSNINNYRPISVLSIFSKILERIIFNRVYNYFNYNNLLYNNQYGFRKGSSTEHAIIQFIHNISKSFEKSQYTLGVFIDLSKAFDTVDHHILIQKIKYYGLNNKILKWFESYLTNRKQLVYSNDGYQSEPLSITCGVPQGSILGPLLFLIYVNDLNKASKLKSIMFADDTNLFLSHTDIYELFSTTNKELKHISNWFKANKLTLNINKTKWIIFHSCAKKRFLTNNMPQIYIDETIIKRDTVIKFLGVYLDENITWRKHIDHISTKVSKNIGILYKARNYLNKKNLTQLYYSFIHNYINYAIIAWGSTEKSKLQHLYRRQKHAIRVVNYADRFSRSKYFFDYMNVLDVYKLNIFNVLCFTFMWKNDLSLFVFNDLFSLKPINKYTLRSNSFLNEPFCKTKFNQFCIAYRAPHLWNKIVLPNFDPSTTLPVFKTKLKNFILCMDNILKFY

SEQ ID NO: 2929 - protein, 879 aa, synthetic construct
  source 1..879: note = Description of Artificial Sequence: Synthetic polypeptide
  VARIANT 82: note = Any amino acid
  VARIANT 133: note = Ile or Leu
  VARIANT 139: note = Any amino acid
  VARIANT 141: note = Any amino acid
  VARIANT 292: note = Any amino acid
  VARIANT 741: note = Any amino acid
  VARIANT 804: note = Any amino acid
MDSNEPVNFESTLFNFFQTNDFLLDSDSDPDLNYFSEAGALQNKCSYFYNHEIKEFLDRDNFNVIHINIRSLKKNFENFRNXIEETFNIFSIICLTETWCDSDDVNFNSNFHLPGFNLISLARKTNKRGGGVXIYVKEXLXFFTRLDMSISDGDKEVLTIEILTKKTKNIIISCCYRPPSGVIESFNSFLRNDIIKKSNHEKKFNYLIGDLNLNCFEYHVNNNIKRFYNDIFENGAIPLINKPTRITQSTSSLIDNIITTDVFNESLKKGIIKSDISDHFPIFFSINTNNEXVTKTHSLCLKTIKFNDKFLYDKKEIANELNKYFVSVGPNLAKKIPKAINPINNLFIPNTSQFNSFELSFEEFESAFKMLKPDKAVGPDDINGNIVINSYDIIKDILFKIFSCSIKQGIFPDQLKIAKVIPIFKGGDLTNVSNYRPISILSVFSKVLERISYNKIYNHLSVNNLLYSNQYGFKKNNSTEHAILQFTRSITDSFENSQFTLGVFIDLAKAFDTIDHKILFKKLKYYGITGNVLNWLKSYLNNRKQFVYVDVVSPVNLFDITCGVPQGSILGPLLFLIYVNDLHKASNLMTIMFADDTNLFLSHNNITTLFQNMNIELVKISDWFKLNKLSLNIDKTKWIFFHPNRKKHLLPSEMPLLFIDNILIKRVTVTNFLGIYIDENLSWKNHIENLCSKISKSIGILYKARSVLNKHTLIQLYYSFIHCHINYANIAWGSTNKSKLXPLYRQQKHVARLINFKDRFTHAKPLLFEMKVFNIYELNIFNVLCFMFKCKTNISPVSFHNLYXKKEKNKYILRNDNFIRQPVFQTNFGKFCISFRGAFLWNKIVLKNFKDFSQECNYRSFKQKLKKVIFSIDDISIYF

SEQ ID NO: 2930 - protein, 1254 aa, synthetic construct
  source 1..1254: note = Description of Artificial Sequence: Synthetic polypeptide
MVNLQLGDFNTYKCEQEAIIVDLKKLIETLRTDNANLTKRVLDLENSKSKSSSAVTGDWASKVKKTPDQMQIINTIANETKERDKRENNLVIFGLEESTLSDKVKAIEEDKQNIETIMKKLKVNVKIKNVIKLKSKNGYKAPYIVVLNDKLERNSVLKNAKELKKDKTYESVFINPDLTESERYKSKLLREECKKLNNDNINKANFYFGIRNDKVVKIKKQLNAKKDLNHIRCFNYETNNKINLFSGGGQNLNKLLSNKRQLDIEIVNFHERKKCDLSINKEHDTQKCNELMIWYTNATSLNNKIDELRLQCEIYKPDVICVTETWFKAESDVNIISYNIFRSDRKTHGGGVCIYVKQCINQFETNNLQLNNNFIEQIWTCICFKNNKMLIGCIYRPPDISHEYNNYVLLSINAAKMSIYQKEYSDLIITGDFNYNTIDWSDNNCPFSATDNESQTNKFIECLEDCFLFQCVCEPTFQIANYKSTNILDLIITNDKNKIVSITHSAPLGNVKQGHHLLKCCYLMNDYKFSTEHKKSIRLYQKGNYELFSCHFNNVDWENGFKSKSINEMYDLFLYHYNYATNLFIPRINYQNRRNRNKWITPELKHKIRTKNNIWLANKRNGWNEESTKIQYNKLKIRIKNDIKNNIKQFESTLASKFKSNPKLLYKYINEKKSVKTHIRALEIDNGEIINDQFAIATELNKYFHSVYVNDNCTNIIEFHNIPSNLLLNTVLITQNDVQTRLQALDKSKSVGFDFVHPYVLKECSSSISYPLYLIFKKSMETGTLPDMWKKANVMPLFKKGSKLKASNYRPVSLTSIPCKVLERIIADCIMQHLIKNNLLSKKQHGFMKSKSCTTNLLEYLDILTDAFHNRTPVDVLYTDFKKAFDSVSHKKLLSKLLTFGISGKLLTWIVCFLANRKQRVVLGKSVTDWVDVLSGVPQGSVLGPLLFLVFINDLPENFINECRLYADDNKIIAPISSQNDSQLFQNDINKLDEWSTKWKLGLNFEKCKIMHFGSNNNEYSYFMNNNNTLMEIEKSKLEKDIGVYISSDLKWAKQVKYAASKANSILSLLNNTFKYKDKDLIKTLYCTYVRPNLEFSIQAWSPYYTKDINELEKVQRRATKMIPELRHLEYKKRLEILGLTTLETRRLRCDLIQQFKIFKGIEIIDIKQNQTMNSICSSGPAANIRGAKHRMKPELVRNCLKRQYFFSNRVVDGWNSLPAEVVQSTTVKSFKLNLQSVDLEAITNKIKTKKAYY

SEQ ID NO: 2931 - protein, 1232 aa, synthetic construct
  source 1..1232: note = Description of Artificial Sequence: Synthetic polypeptide
  VARIANT 581: note = Any amino acid
  VARIANT 989: note = Any amino acid
RWQPKFCIKYYNFNFLPKLKIFIQLTLIKMVRKEDFEALVSRVLKLEAELLTKDKEITQLKILVNDLKNQPSNVLNSSACAWSDVVKGKKSNKAAQLDLVNVVVKESQDRDLRQKNLIVFGFNTSKNKNDDVAREEDILGIQNIFNQINAKATIQRVFKLSIKSDKPPPVIVVLTNKEERNAVLKTAKTLRNLPETNNIFINADLTVAERLKMKALREERAKLNETNKDLQYYYGIRNERVVKLIKRQFISSQQDQLLFSKNLLFKNSNKFIEKNNKRQLINLKNQELFNHPKNNYCGKWALTNIRSLGNKIADFQHFVHLHSLDICCVIETWLNKNLPDSLLCPRFYTVLRCDRSSKGGGIAIFFRSFIQFTKVDIPPEFHELEIVCADLNLNGQSFRVIGYYRSGGFGKVAIDYMQSSVKCFSILCSTKKNVVILGDFNLPDIDWHYYHGPDSVIHNSFLHFINRYSLTQHVDQPTRENSILDLILSSSSSFISNLCIEPPIGTSDHNVIIFTPNLSCLYNKTEVPVQQFFCWKNADYQVINKYLKSVDWSIIFQTCFNIEACWHTFSTILNNIITQHXPKVRVCEEHKLSHKIHYPYYVKRLINNKAMAWKRSKVTGKSNDKAAYKSIAAQCSDSIRKYHAAKELKMIRKDNLGSFFNFVNGKLKTCSKLNDIRRSDNTLCHDKEEISCIFNNFFASVFTVDNGLSPKFTDRVNVHSTCLSSINFSPSTVEKALRALKPTTSTGLDGIPNVFLKNCANSLSIPLSHLFDTSFKDGAIPLDWKVASVIPIHKKGPTVDPGNYRPISLTSTCCRVMERIINNKLINYLLLNNLITKEQHGFIRKRSTCTNILESLHDWTLNLQRRIPTDIIYFDFKKAFDSVSHPKLLMKLPAYGIVGNLLNWLTNFLHMRSQVVNLNNVTSHAISVTSGVPQGSVLGPTLFLLFINDVSHINKQLDVKLKLFADDIKLYSVYDVRGLQSDLHTAVNXLYEWSCTWQLQIATEKSFVCTIANQSQNIAQRVYTINNHELAHVNCIRDLGVTIDRNLKFNQHINLIVHKAMSRAFLILKSFYSRDRLLMVKAYCTYVRPMLEYCSSVWSPYTICLINKVEKVQRFFTKRIAGLWSVSYDKRLAILKLNTLEYRRVFKDLVLCYKILNGKLDTDLSNILILNSYLNNRGHNFKLYKHHCSLNSTKCFFSNRIVNVWNSLSEDVVSASSVLMFKKRLAVLLCSS

SEQ ID NO: 2932 - protein, 577 aa, synthetic construct
  source 1..577: note = Description of Artificial Sequence: Synthetic polypeptide
  VARIANT 39: note = Any amino acid
  VARIANT 66: note = Ile or Leu
  VARIANT 248: note = Ile or Leu
  VARIANT 311: note = Any amino acid
MLKKEISESEIKQALGQMKNNKSPGSDGLTIEFYKHFFXLIKKDLIESLNNVLFTGEMTNSQKEAXITCIFKKGNKNDIGNWRPISLTNVDYKILTKVLANRLKDVLPNIIHSNQTACIKNRTIYYNLSYTRDIISIAKKSKLDACILSIDQVKAFDRVDRAFLFDSLKHFGFGKIFISFIKTIYNNINAKVKINGLLSEKIDILRGVRQGCPLSMILYIIQAEIFSCYVRQNKNIKGIHVKESETKXQQYADDTNFFLIGDDSIREVGKALKLNQKATGAKINIAKCQGIWLGKNIFKDKSEYLNFNWDXNTFKSLGIFFSNNANFQYETHWKERFNKMENSMRKWEKYKLSIKGRKTIINSLIIPQALHLAFIAPLPSNGILNKIEAKINNFYWGGKICRLNKTKTQQKINEGGAGVNSLTNKLKAIQLQWISKLYNESICGPWKDAMVYILNLYRNANQSKHTFETIPTQMKLLPPFYSQLLVNWHSLKQKHVLPITKIEEILNQPLFFNSMIKTMPNKFLTPSETHIKNDIILVADITKTFQPGFLHHKSIGLTEKELEFLTKALPRKWYKKF

SEQ ID NO: 2933 - protein, 1155 aa, synthetic construct
  source 1..1155: note = Description of Artificial Sequence: Synthetic polypeptide
  VARIANT 394: note = Ile or Leu
  VARIANT 434: note = Any amino acid
  VARIANT 444: note = Any amino acid
  VARIANT 467: note = Any amino acid
  VARIANT 487: note = Any amino acid
  VARIANT 525: note = Any amino acid
  VARIANT 576: note = Any amino acid
  VARIANT 593: note = Any amino acid
  VARIANT 751: note = Any amino acid
  VARIANT 796: note = Any amino acid
  VARIANT 970: note = Any amino acid
  VARIANT 982: note = Any amino acid
  VARIANT 1078: note = Any amino acid
  VARIANT 1117: note = Any amino acid
MKVKKIFEDILSVKNVQIERAHRTGNKKLKMPRTIVIKLLDFRDKVAILSKSSKLKGKNIYINEDFCFETTQIRKNLREKMKIERAAGKFAFISYDKLIIRDWVAKKSKNLSSTVLKMEENVIFKSSNENDIIGDNDTDSNYFNHKMLESQYYSVSESSQYLGQTKNTFSILNINIRSLNKNFENLKILLDEIKHDFKIICLTETWCKCGETNYEFELVNYTSIHQPREVNAGGGVSIFIHNSVNYILRNDLCVNETDYESLCVELVNNKEKNIIINTTYRPPSGNLKKFKTHLKTFLNKITNSRKHIYLVGDFNINLINYASNNNAKNFINTLLQYNFIPTINKSTRITNRSSTLLDNIITNNFHNNPLYTGIIQTDLSDHFPTFLATNNILXNNISTKSTIFRRQINENSLKQFKNCLKNCVDWNLILQSNXANNAYDLFLXQFCEQYEIAFPEIKKVINTKSLXNPWMSKGLLKSSKKKEKLYXKYLKKKTYKNEITYKNYKNIFEKTKKRSKKLFYDQLLXKTNGNTKKTWNLIKDIIGKNKRKKNNLPKNLLIDGELVYDKSIIAEELNNXFLNIGPNLAAKIPTNSXPFDSYLKTYDKLMDETNLKPSELRTAFSSLKSKKSEGFDKISVDVVKSVFDIIEPSLFHVFDLSLKSGIVPDKLKIARITPIFKSGDKSNILNYRPISVLPCFSKLLERIMYNRLYNYLTENNMLYCKQFGFKKKQFNLRTICCIVNNLVLKKNNSTXHAVVELFNQISNAFNNDCFTLGVFVDLSKAFDTVNHDILIKKLEXYGVKNKNLLWFEDYPTNRKQFLYYNQNNTIKHSITCGVPQGSILGPLLFILYINDLYLASNLLBLILFADDSNLFYSHRDIKALFKIVNEELCKVNEWFISNKLSLNVEKTKFMLFHKPNKSENIPLKLPDLIINKTYIKRESNINFLGVILDENLSWNSHINSIEKKISKNIXMMYKAKPFLNIXSLKKLYFSFIHSYLSYCNIAWASTNYTKLKKLYSKQKHACRIVFGANRNVPCEPLLSELGALNVYKLNIHQVLLFMFKTKNELSPKIFQSYFNEIXHKYPTKFSDNNFVVPKYNLKLTSYSIQYRGPYLWKKFPXIVNKKKTLRDISLEQFKNESKRLLLFMDLNKFDFKCFF

SEQ ID NO: 2934 - protein, 1246 aa, synthetic construct
  source 1..1246: note = Description of Artificial Sequence: Synthetic polypeptide
MTNLTPAQLKQVEDAIKKLIHAETAKWSAKISELEQVIKQQQLIIDKLIQNPNELTNTTTSSIESSWVTVASKNIKKKQPIEQLKIINTFAIEQQQKKKREKNVIIYGIKESAKLSVADKHIDDKETVQNILVTISSDAKPKSVKRIKSTSSKPGPIIVELSDVSERNPLLTAAKKLKNSDNYKNIFISPDLTEAERYLNYQLRMKRNELNSNINLKTSPFRYGIRSSGVVKLKNIQTTTKHRPLDTVYEAAESSNSKIYKPLHKHYYPSSTLLPANLKYKSKNLHNKKTNYSVNCYYTNATSLDNKMADLISISRTFDYHVIAISETWFRNDSVPNIDGYSLYRKDRQDGRRGGGVAIYITDVFNSHEVNQFYTNLLEQVWVSVKFNNKHILIGCIYRPNDASLIKYVAESFKLAHSLIKKPYDDCLIVGDFNFPNIKWSNDGIESFNPNNPTEYDFWNIFQNSLFTQHITFPTFQTDYGSSNNMLDLLFTYNSNSILNLSPSTILGNTTKGHFSITWRFLVSELFTESESQSFNYKKGDYDSISNFIASIDWEFLFLHKTADQMFNILISNYRTACTYFIPKINKTKKKYDPWVTPHIKNLIREKKSAWHINCSTKWENSELKIKYNRLNRSVKTEIFKAKKAHEKEIISKSQNNPKIVYKYINKQLKIKDRIRSLKDTSGRIIEALPDIVDLLNSQFKSMFTLESSENFPLLNKSGILSECIYNENLDFSISDIIQELADLKPYKSFGSDGLHPLILKICAKSFAIPLTKIFHKSFNSGVVPTQWKLANISPIYKKKGDKLLAENYRPISLTSVACKIFEKLVKKKILKHINDNKMLSANQHGFLYHKSCVTNLIETFDIISSSIASHQFIDVIYLDFAKAFDSVPHNRLLLKLRSFGINGKLLQWIKSFLVGRKQRVTINNTSSAWVDVLSGVPQGSVLGPLLFILYTNDLAKLTETSEIFADDTKLFSKTLSQSNFVDLQDRLRLVYEWSNTWLLKLNTSKCCVIHYGRNNPHYNYFLQNNQGINQSLRSSTKERDLGVIFTSNLKWSAHIQTVVSKSLQILGMLKKTFTFIDEKMALKLYKVFIRPHLEYGVSIWAPFLKADMALVESVQRKATKWAYSLRHLQYCERLKRLNLPSLEFRRLRCDLIQIFKLIHRFDIVNDKYLPKYINSVSRGHHSKIRREYVLNCLPRYNHLYNRSAKYWNNLPEQITLYSTVLSFKNRLDSWLWKKFGTNIYKTGCL

SEQ ID NO: 2935 - protein, 1239 aa, synthetic construct
  source 1..1239: note = Description of Artificial Sequence: Synthetic polypeptide
NLIKILIANMVNVQSTEFNVYKADQDKLIKSLIKTIDELKNCNLLLTERLNVLEKAKVVPSTSISWASVVSGNMPPKRSTEQLHLMNAVVAEAKEREKRESNVVVFGIEASKKADLLSAREEEKNSILHMMNSINAKIEIKQIIKLKSKSDKESPFVIVLNNRNDRNSFLKAAKSLKNSTEFNKVFINPDLTVAERYKAKLLREECKQKNLENSEPSLFYYGIRNEKVIKISKQSFYNCKNQKYFSHGSLTSLVIPKSLQKNHASSISKQRITAVNNKSIKKVICSKRSNFINSYNHLTTNSFNNFTVYLFNARSLANKLNDFFLYVESNKPALICVCETFFNDKLPNSMVCPKNYSIYRKDRVRIGGGVAIYCRNDVKSAIVSITQTDKDIDIICVDLIFGSSKLRLITCYRPPSYSLDDYIYLESMISIISNLCESVPQFVIVGDFNLPKIDWVNYVSPIEKCHNLFLTLVNNLGMYQYVLEPTRENNILDLVLSNIISLLSNISVECPFSTSDHNSVFFYINTFNYYQPETNSESFYDFKNTDIIAFNSYLSKISWDFDFSFVFTTEEYWNIFSNHLRKGIDRFVPIRTIYHNKKSRSYPKYIYKMLIRKSFLWKRWSITKTTLHKKAFIQYASKCKKAISTHHKNVELKLVKENNLSKFFSYVNKNLNNPKKIYPLKTNSNFTTTNVEIAEVFNKHFGSVFTIDDGILPKINTFVSEHIKMNFVDFSAKIVYQKLKNLKPSTSFGPDGIPNILLKQLAHIICIPLSYIFESSFTSSSLPKQWLQATVSPIFKKGSTSDANNYRPISLTCTSCRVMESIVSSSIADYLNINNLITPNQHGFLSKRSTCTNLLESTNDWNKALDSNLITDVVYIDFQKAFDSVPHPKLLKKLAMYGIIDNLLHWISAFLSNRYQRVLVGNSLSNPTCILSGVPQGSVLGPTLFLLFINDLPSIVKDLNCSLMLYADDIKLYSSFKDADYSHDLAVAIYKVYLWSKKWQLKIANNKCFTHRIAPTSFCKDINYNYQLGDHNLTWSTNPKDLGVTMDSYLNYSNHISNIVRASNIRGYLILKCFKSRDPRVIVKAYTTYIRPILEYCSPVWSPNRTKMNNTVERVQRRFTKRISNLNNVSYSSRLSILGLELLEIRRLKQDMITCYKILNNLVCLNKSSFFLFNNYIYTRGHNFKLRKLKCKLDVRKHSFSLRVVNIWNNLPSDVVNAKNIKSFKIKINSIDFEKYCSG

SEQ ID NO: 2936 - protein, 1290 aa, synthetic construct
  source 1..1290: note = Description of Artificial Sequence: Synthetic polypeptide
  VARIANT 1048: note = Any amino acid
MVNVQSTEFNVFKAEQEKLIKALNRTIEELKNLNLLLSERVKMLENAESVKSSPLLSWASVVSGKTPVKKTVEQLNLINVVTAEKKEREKRENNVIIFGINPSKAIDKSSAIKEDKNSIQEVLNSINLKVEVKQIIKLKSKIDNQPPFVIVLNNKTDRNSILKAAKLLKNSSEFKNVYINPDLTEAERYKAKLLRDECKKNNLENSESLLYYYGIRNDRVVKIAKQLLFNNRKLSHMSHCATELANSSRISCEYLISKSSKPDKIICTKKCRNKPINLNLINGNSNNGCNSNNGCSSNPYSKNSVYLLNARSLANKLHEFFMFTEANKPAIICVCETFFTSKISDSIVCPKDYSIYRKDRIKIGGGVAIYCRNDIKSEQVQITQTDTDIDIVCIDLIFSSHNLRLITCYRPPFYSIADVAYIELMTAFIYNLCHSVSQFVIVGDFNFPKMDWLNYVSPNEKCHILFLNLVNNLGLHQFVQEPTRENNILDLVFSNNISFLSLISVECPFSTSDHNTVHFSININDLDQSNKNIESFYDFVNADIDGFQSYLLNINWDFEFSFLFLQLKIIGTFSPIIFAMVFINLFQLERVILIKKLGLRVFLFVFTVEDYWNVFSNHFCNGIHQFVPIRKSNLNKKIKHYPSFIGKMLNRKAFLWKRWSNTKNITHKKAYNKYASKCKKSLLTYQMRVELKLVKENNISKFFNYVNRKLNNSKSIFPLKDKNNNNKITCSNEEIADVFNKHFGSVFTNDNNYSPFINSYVDDSIGIEDCTISTRSSVLVVTKKSLTCLTNTLAVSLQMITITLHLLIVMLMIQLVLKTVLFPPEAVYKSLKEIKASTSYGPDGIPNILLKKLAHLLCIPLSFIFDASFKSSSLPKQWRQAFVSPVFKKGATADPNNYRPISLTCTCCRVMERMINVYVIKYLGHHNLISLNQHGFLNKRSTSTNLLESANDWNTALDNHQITDVVYIDFQKAFDSVSHTKLLVKLASYNIKGNLLNWISAFLTDRYQQVKVGNSISNSIRIVSGVPQGSVLGPTLFLLYVNDLTAIXNNLDCCVKLYADDIKLYSSYCDMDLSQDLVVALNRLLQWAETWQLTIACSKCFALRIAPPSLCKGIKVNYKLGEYSLAWSSNPKDLGVTMDCNLNYKKHIFNVIHQANSRAYLILKCFKTRDPCILVRAFTTYIRPILEYCSPVWSPHQIGLIKSVESVQQKFTKKIRSLRNLSYHNRLQLLGIESLEVRRLKNDLVTCFKIFRKLVCTDQSMFFAIDNNSHTRGHNYKISKQSCRLDIKKI

SEQ ID NO: 2937 - protein, 1088 aa, synthetic construct
  source 1..1088: note = Description of Artificial Sequence: Synthetic polypeptide
  VARIANT 493: note = Any amino acid
MLIRNLCKFCNKTVVDSHKGILCNYCSSWLHPKCNYINKHTYSLIEKDSTDWYCSDCINKNLPFCSLSDFELSLTLSSQTIPTNNLKSLKSPPHFKKLFNNINKISNKSINCKYYDILELNKVLNNNCNLYLHLNIASLPYHIDGLRSLISSLTTLPIVIGISESRLNINDSSKTDVNINGFTIEHSPTEAKKGGALLYLRSNLNYFIRSDLIVYSPKYLESIFVEIVNPLKQNIIVGSIYRHPSMNSNEFITDHFNPLLERLSLENKQVVLMGDFNMDLLNYNESKVISSYLDTLCSYSFFPSIIQPTRITATSKTLIDNIFLNFQTPDLISGNLTISISDHMAQFICIPCLSPKKTKEVIFRRTFQNFDNKKFIKDISNADWQIQITNNDNVNESLHYFFKTFNKILDQHAPYKKLTAKQIKLKSKPWITNGILKSISIKNKLYKQYIKAKNHNIKIHIFNKFKWYRNNICNLLKLSKKSYYINFFNNNLXNVKNTWKGIKEIINIKPSSFSSKSINLKFNGNTISDSKAVSNIFNNYFVNTQQTLLTKIVSPKCNFSDYLNNPNINSFFIDPVTENEVSNLIKSLQSKKSLGINSIPTFLLKLVSHIISKPLCTMINSSFENGLFPDVFKIAKVIPLYKKGSRTDHTNYRPISLLSNISKIFEKAMHNRLYNFLDKYQCLYKHQYGFRSKHSTTHALIEITEVIRKALDDKLFACGVFVDLQKAFDTVDHSILLSKLEYYGIRGISLQWFTSYLYNRFQFVSINGNTSSLVKCTTGVPQGSVLGPLLFLVFINDLNLSLKYTTSYHFADDTNLLLINKSLKKINKYINHDLSNLIQWLRSNKLSLNTSKTEIIIFKSKQSKISKHLNFRLSGQKINPVMYLKYLGIKIDSNLTFSQHLKDLSIKLCRSNGMLAKIRHYVNLETLINIYHAIFGSHLRYACQVWGQIRTQEILRLSNLQNKALKIIYFQHYQSNSDHLYFLSKILKIDDLVQLLNCHFVFNYKQKCLPSTFTNFFTVRESCRYHLRSANSYNLHVPNHSSVKYGLKSIKYQSVKSWNSLPSPLKSIDSITNFKNCLFNYFLARYYT

SEQ ID NO: 2938 - protein, 1147 aa, synthetic construct
  source 1..1147: note = Description of Artificial Sequence: Synthetic polypeptide
  VARIANT 289: note = Any amino acid
  VARIANT 422: note = Any amino acid
MTSLKRNSNRRNRPCQGEPQLLQILQWNAGGMSQDKKIQIQKILDTYNIDIFTIMESNLTDDKLTYYQFPGYTLHLLPKDRQVASGILTGVKEGLTSHCEIIKSMGSMQDICEIIRLNVWKSQNHFKMYAVYNPPQNRPNFDLLNISHKTIVLGDFNAHSTRWGYKNRNTAGKEIEDILNSSPLELIYSDEDPATYLHYNGTRTTPDLLLVSSDISELTQRKIIDDPGSGHKPVIASITINSKSMTPKMPTKVLWKFKKADWPKFTNLLETELNASPINYNQHPDKLCXNITNIIIKCAKKTIPRGKVKHYRVFWSKNLEELKRKREVLRNTAEQTGKTEDVQAWRRQSAVLRQAILQAKRTTFNSFISNINYQNDSQRTFKFLGNLLNNKKKPKKEPIRLNNKLLTTDSEIANSFARFYSXKQKKNPFVRNSSRDIRKQVTKFDEIKEDTAIPHKVLTEPFSSHELNAAIKQLKCKKSPGEDCIHPEFLIRMGPKAKEILLTLFNKIWETSLVPTQWKVAIVIPILKKGKDPSNFDNYRPISLTSMLAKLMERMVNTRLTWFLETNNILGNEQAGFRPQRSTNQQVATLSQHIKDALDARNTLTAVFIDFKSAYDLVWKENLILKLAKIGIRHNMLNWIKAFIGQRTCKVRYGNDLSKSNLLQTGLPQGAVTSCSLFNVFINDIAELVQTVTGVKCLLYADDLVLWYSAPKKNAQKRTEIALNYALKLLANWCDNNGMVINTSKTAYQTFSLAHHSINPHLMYKDTPLEQTNESTYLGVTFDTKLTWKNHIAKIAERASNRLNVLKRLAGSLWGSARSTLNTTYKMFVQPIMLYCCETLVTASEAILKPLEKTHNQALRLITGGIKSTPIDAMLLVTGNSTIRSSVEEKALTLYEKLLRIPSDTFWSSYENRPRHLKTQVGLIQKAIELKKRLQTTDKPESLSLPQNPLADNEVQFCTQLLGHSMKADTPPDQMRLLALETINANYPADQWLQVFTDGSYVENQANVGAGVYSELFTFFAAAGQNRSAFEGEIEAIKIALGQLCCRDTKFTNAVILSDSQSAIQSIGNREPPKTAEIHECKKLYQLLKEKNKTIVLQWIPGHCGIIGNERADTLAKKGTTILQANIFLHNEDLNQERIQDSKKQRT

SEQ ID NO: 2939 - protein, 937 aa, synthetic construct
  source 1..937: note = Description of Artificial Sequence: Synthetic polypeptide
MECTLYYQNVRGLRTKSSEFLSGVIGNSYTIISLTETWLEDTIPSSQYFPPCYSVFRKDRDYAATRQRYGGGVLTAVDTSLCARRRYDLELYSECVWIEVTCRDGLNFLIGNYYFPPHLSSDVFARHFRDLEGKLDVTKFRVHIYGDFNLPGIDWLANYNLITSDVTSLKASSLFDFIYFNGFEQRNTIQNSAGNVLDLVLVSTPINYISPITDPLTRVDHFHPPFAVSFCFPLRKQALCSYEYLLYSSGDYLNMYKYFQCYDWKPILNNKCADSAAEALTEVVSSAINDFVPKRVSRLNKYPAWFSKELRSCLRRKLHYHRLFKRSGLDKWYAKFSECRALAKWLFKKDESAHLHGLESDMYAKPQNFWKYVPTKKKRNSSVAPMRNSSGYTCDSIEIANMFAEHFKSCFSSASVPDNNATCHGTSDFLSFIPIDEPEIRESIRNMKSKLSAGSDGIPSFIVKGCAELLTPVLLHIFNLSIHSGIFPSIWKRSVVVPIHKAGDPSTVNNYRPVSLLCSFSKVFEMIMHKRLYRHFRHKMNPEQHGFLKGKSVETNLCSFLDYAVPLVCNREQVDVIYFDMTKAFDKVNHSTLLTKLDSYGLCLTYCQWFKSYLTCRTNYVRVSGSMSDYFSSPSGVPQGSNLGPLLFLMFVNDISLCAKNSKVLLYADDIKLFRRVQSHSDCVLLQEDALQISQWCAKNYLPLNEQKTRTMSLTRKRDSLAFSYTIGGSVITRVSVIRDLGIFIDSSLNFNHHVLTICNASFRNLGAISRFTRKFSSPVCLVRLFCCLVRTKLEYASSVWNCINLTASCCIERVQKRFIGIIYDRYFDRTCYYSYEQLLKKLGLCTLLDRRRLRDLMFLHKVVNGAVDSPLLLSTVCFHAPLRSNRFQSPFYPSALNVASPLTRMQLEFNKLDQSAVDIFSDLIVFRHRLESIICT

SEQ ID NO: 2940 - protein, 247 aa, synthetic construct
  source 1..247: note = Description of Artificial Sequence: Synthetic polypeptide
RRGIIFFISYAAPLGGSSADTLRTTALGLVYSTAEYCAPVWMNSAHTRKIDVQLNGTMRIVSGTIRSTPTSWLPILSHIPPADLRRSNALLREYRKITNNPRLPIHHDTPDLERNRLRSRHPTMKTAKELHNTDFNLIESWKERWRQACPEQCQALPCITERPPGYELPRKAWSSLNRIRTNHGRCADSLYRWGKIPSPNCDCGADRQTIRHIIEDCEMRAYDGNVSDFLTAKDAAIDYIRNLDVCI

SEQ ID NO: 2941 - protein, 1040 aa, synthetic construct
  source 1..1040: note = Description of Artificial Sequence: Synthetic polypeptide
  VARIANT 62: note = Any amino acid
  VARIANT 221: note = Any amino acid
  VARIANT 478: note = Any amino acid
  VARIANT 538: note = Any amino acid
  VARIANT 564: note = Any amino acid
  VARIANT 670: note = Any amino acid
  VARIANT 717: note = Any amino acid
MIMKKKQQTPESVLTRELGSTTRICQLNVEGLSSSKSQFLSKFLMENDVDVAVLQETHIENXEQQRSRGKIHGYDLLGAVYHRHYGLATYVRSSIENAALVSLSADCFQQIVTKIGELTVVNIYKPPQTEWPQNVIETHPHPTIYAGDFNSHHTDWKYRTTDINGEKLSNWAEENHLHLVFDAKDKNTFKSAIHNTETNPDLSFTTRNSQSHPIPTRRKIXESFPHSQHRPILLEIGINIPLIRSLPRPRWNLQKANWDKFSNDIDQTLRWIPARWYNYDRFVNIIIAAAKRYIPRGYRKEYIPGWNEETEELHQRFLQENDAEIADKLLRNLDVARRKKWEETTEALNFTKSSRKAWNLLRKLGDASAPEREVPGVSPNQIASRIVSLSRAPRDKKRTTFVKRHLKSFRQSVEAPNKISRPFTVEEVNTAISKIKKGKAPGFDGVLPEFLIHSGRRTREWLSQFFSHIMQTGLVPPXFKKAKIISLNNIFVKPGKPKDKPESYRPISLLSTTYKLLERLILGRIEPILEEHLPVEQXGFRHNRGCEDQVLSLTSHIEAGFQQXLKTTVAFVDLTVAYDTVWKDGLLYKLYRTVPCQKLLRLFNNMLRDRTFQIIMGDKASRVRKINNGLPQGSVLAPALFNLYISDMPETKGRKFGYADDLAIAVQAKXMEDADTLLSQDLEVVGKFYADWRLIVSTSKTETTSFHLTIGKQQNLXKYFSTIKCSPIISSQSILVSHWIAPSPSGNTWKQRQPKSTLAITSCTNCVAAGGEHMLPLFSLNNREATKSPKVLLNNKVLPHNQFPKYLGVTLDRTLSFRKHLEATAAKVNTRNNILHKLCGSRWGAHASTLRGSALALVYSAAEYCSSSWLNSSHVSKLDARLHDTMRTISGCIKSTPVQWLPVLSHIAPPPLRRKGCLVRQLKRIQSDPDLPVHKDIPHLSLRRLKSRKPPLVSAQQLQDADFNITEQWRTDWSTVNFTALWPDPTERPTGSNFPADNGKRLTGSEHLTESVRILCTSGAYRKSSVRLWCFASDNRPYCV

SEQ ID NO: 2942 - protein, 1192 aa, synthetic construct
  source 1..1192: note = Description of Artificial Sequence: Synthetic polypeptide
MRCRSSHPSILQWNCGGFFHHLAELQQLMCHSLLCIAYRKRGFLFRGPLPYVATGAISKIAPSVTGSLEVCASMSLPLSPVRCAPHHESQGLWRCVPLCPCHCPQCAVPLTTNLEAVAVRIRVRQELTICSLYLPPDEVVCLADLVPWSLNFPRRFSFWGILMPTTLCGVGRRPRLVVGMPRALVAQLPPPFLLLGDFNAHHPMWGGTQTSARGRDVEMLLTQRNLCLLNTGAPTHFSVARGTYSAIDLSICSPSLLPHLNWNVHDDLCGSDHFPIFLSLPETQAANRLPHWSLHRADWPAYASAAVVTTPLPAGIEVAVQQVTKAIVSAAEKTVPTASASLRRKSVPWWTQEIAEAIRERRRALQRTGDTLLGHPGTSARASAHRRHPSVENLIAFKRLRARARRLIRQSKKDSWERFVASIGSRASPSRVWTQVRRLFGYRPPTGIPSLTIQGALCTDPQAIAEYMAEHYARCSATETYSADFRTFKERVERKQLSFRTRRQELYNAPFSEWEFETALAACPDTSPGPDRIHSQFLRHLSAEFQHQLLSLFNRIWADGVFPSQWRESTVIPVLKPGADPLVADSYRPISLTNVLCKLLERMVSRRLMWILEDRGLLAPQQGGFRQGRSAIDNLVSLESAIRTAFTRREHLVAVFFDLRKAYDTTWRHHILATLHGWGLRGSLPIFIQNFLSPRSFQVRVGTCLSSPHIQENGVPQGSVLSVPLFLIAINGLAAAVGSSVSSSLFADDFCIYFSSATIGVAERRLQGAIRKAQSWASAHGFHFSGSKTRVMHFCRRRALHLDPELYLGNELLRVEETHRFLGMVFDARLTWQPHLRQLRQKCWKHLNILRCLGHTAWGASRPTLLQLYKALIQSRLDYGSIVYDSAAPSALQVLDPVLHSGVRLATGAFRTSPVTSLLAEAGVPPLRFRRQRLLASYAAHVHALPHHPNYRLLFPDVALPSPRRRPRSGLPIAVRVRSLLSSLESLPIPPTFHYPSRAPPWSVPVRSFGIPSYSPHFSLPFPCSSLVRTRPQLRLDLSRDSKASVAPLNLRRQFQAVLGSFHGAEIVYTDGSLVDGRCGYAYAHDEHIEQHSLPCGSSIFTAELIAIRRALEHLRACPGESYVICSDSLSGLQALDQCFPKHPLVRSIQESVTFLFSLAALWSSFGPRDTLEFRGTNAWIGWLSRQLLQAP

SEQ ID NO: 2943 - protein, 497 aa, synthetic construct
  source 1..497: note = Description of Artificial Sequence: Synthetic polypeptide
  VARIANT 28: note = Any amino acid
  VARIANT 29: note = Any amino acid
TKTWCMMGGFPLTLLFICSQTSNRTVIXXEQAGFRPNRNCIDQVLSLTTFIEAGFQNKEKTSVVFIDLTAAYDTVWRPGVILKLLQAIPSIKINHLINEMLSNRCFQVIMGNNISSPMKLNNGLPQGSVLAPLLFSLYISDMPETKSRKFGYADDWALATRHKDLETTESILTNDLSTIGEYFRKWRLQPSATKTEVSTFHLSNKLANKELTVHFEGKVLRHNRNPKYLGVTLDRTLSYKQHLAKTAAKIKTRNNILQKLCGTSWGSSASTLRTSALGLVYPVAEYCSPAWLNSSHTKLVDAQLNHTMRLITGTIRPTPTFWLPILSHIQPPSLRRKNALVSEYKKLQKNPHLPVHEDIPSIRKARLRSRHPPLETARTLVTNSFNTDDCWRQTWQINATPEQLKMPCISTKPPGFDLPRKDWSALNRIRTNTGRCADLLYKWKKIASPSCDCGAEKQTVYHVVQECPLRAFAGDQTEFLMVTEGSLDYIHGLDISL

SEQ ID NO: 2944 - protein, 738 aa, synthetic construct
  source 1..738: note = Description of Artificial Sequence: Synthetic polypeptide
MMNSRDAAHRRFKASTKPEHYEEYRKLRNKVKQCIRNAKIRYARSFVCSNTNPATLWKNLRSLGVGKATPESVFQISADELNEFFSAPINCQAQINNRPEESPSHITNDDTFHLKHVTINTTRKAIMRISSEAIGNDGISITMIKNVADSLLPVLTDIYLISLSFSANQHIACVSKALEYIVHDQITEHLCKFSLFDKYQSGFRKNHSTNTALIKVTDDLKFAMNNREATILTLLDFSKAFDTVNFDILLNKMRQLKFSNSALKWFESYLKNRQQSVVCGNEKSSWRNVVSGVPQGSVLGPLLFSLYVNDISSVLTFCKYHFYADDLQLYQSTRPEDINTAIAQMNEDLSSVVTWAKNLGLKLNAKKSQVILVAHQKLISSELRDQLPPIQLDGIPIPYQKTVKNLGVIIDEHLNWADNTVTVCRKTSACLYALKKFRNIFPQDVKCKLVQSLVLPNLHYCDMIQHGTSSENTRRLELTMNACVRYICNIRRYDHISASYTQLGWLRPDKLRDYHTLCLLHRLLSEQHHSTSPQNLTIFRAIIILTQDPTYLVPLCPFIKRKHLQTPSLSLLFASGTSCPALFARFSLLLRLRKSNTSLCHPLKTLAKTHVYSQVSLCVIVKPMLFSPLFLFLLFLSPNQCSSLRYFSSSSFFHHNLLFRYISLCEYYYTHFSPPFPPLPPCPLLLAAIIKTFPYCNTCHVSYLSNTNINCVYVLLLLVLIENFNFCRFSITSVILEM

SEQ ID NO: 2945 - protein, 552 aa, synthetic construct
  source 1..552: note = Description of Artificial Sequence: Synthetic polypeptide
PHQNLLRPFTQAEVDLALSKCKNGKAAGLDDIRVEQIKNFGPITKAWLMELMNNCVQSCKIPKLWRKAKVIAIRKPGKDQNDPKSYRPISLLCHLYKLLERLILHRLMEKLEEYTYHTGWLTGEELHISSDETYTAHRRWVSKERDHRSCIYRSDSSLRYCKQKIFLSNFRDKEADGDRKRMDYPRESVLAPALFNIYTNDQPLPEGTQSFIYADDCAITAQAHCFETVEENLSKALREMSAYYRENQLRPNPGKTQTCAFHLKNRQAARTLKITWENTTLEHCTYPKYLGVTLDRALTYKRHCLNTKQKVAARNNVIRKLTGTTWGAHPNTVRTSSLALSYSAGEYASPVWFKSSHAKIVDVALNDTCRIITGCLKPTPLNKLYSLAGIAPPDIRREVAAKSERGKSETSEAHPLYGHQPANQRLKSRKSFLRSTEALVGTSQQCRTELWRARYTGTAGWFTPCEKLPPGYTEKWSTWRSLNRLRSGVTKCKSNLVKWGFLVESPLCECGATQTTSHLLQCTQCPATCTPEDLLHATPNAIQVANFWASKV

SEQ ID NO: 2946 - protein, 689 aa, synthetic construct
  source 1..689: note = Description of Artificial Sequence: Synthetic polypeptide
MIAANVSEFSWDWLDGASWTQSDWEFQSVTARHSAKFERFLGSESDSNLISRRSVINLTEKTYDDAALSVLGKGLNFAPTPKRLPVVDFISSIEQAVSKLPSDSAEEARREACRVLTGARPPKCNITAAEASALRSLRMDPDIVILPADKGNATVLLNKDDYIQKMQCLLSDSAYRRIGADPTKSVERKTNNLLKKSPFSQETIKSLNSYCAVPPRLYGLPKVHKENIPLRPIVSNIGAPTYRVAKHLASLLSPMVGRCEHHIKNSADFLRRLQGLRLNDSDILVSFDVVSLFTRVPLSDSLQLIEVKFGVELTNLFRHVLTSTYFLFNGQYYEQTDGVAMGSPLSPIVANLFMEDFEERALVSATLKPACFFRYVDDTFVVWPHGSENLNGFLEHLNSIHPNIQFTMEVEKNGCLPFLDVLVRRKVDGTLGHSVYRKPTHTDLYLRADSCHHPAQREGVLRTLVHRAHVISDPESLSAELSHLEVTFRQNGYSERQIKRALRYQPSVQRVSDDSNEVAPKSMAFLPYAGSISNKIGRILRKYDVKCVFRPPSKIKALLGSVKDDLGLRKAGVYRIPCSCGMSYIGQTIRTVEDRCIEHKRYTRLQQPNKSAVAEHCLGTGHPMEYNNTEILACTSTYWDSVIKEAVEIKLASDLINRDGGFCLNSAWNPALSLVKKQRDKINAASPVD

SEQ ID NO: 2947 - protein, 469 aa, synthetic construct
  source 1..469: note = Description of Artificial Sequence: Synthetic polypeptide
  VARIANT 73: note = Any amino acid
TYENNSLSKSDKLIGNMIGNRGFQVIMGNISSQKFLQNGLPQGSVLAPLLFSLYIADMPETACTKFGYADDWXIATRHTNFDTMZETLTSDLSALAAYFRKWRLRPNATKTEATCFHLNNRGADRTLEVYFDDTRLNYNKEPSIQHTSVNGGLGLMPRRQKRLASISITEERTELWKYTLTTHASTTTRSQVSRVTLDRTLSFKTHVTKTAAKVRTRNNLIHKLCGTTWGSTATTLRTSALSLVYSAAEYCAPVWLNSSHVKKIDVELNNTMRIISGTIRSTPNIWLPVLSHILPPKMRRETALLREYNKIEANPELPIHSDIPDLRIKRLRSRHPPLSLDSLTGADINSWRREWLQNAPQLATHQLLEKRMAPKRPTTCHLMPCITEAVPGFDQPRKIWSTLNRLRTGHGRCADSLFKWGLLSSPACDCGAPKQTIQHIREECSARAFSGDFEEFLMATQKLLNIYKD

SEQ ID NO: 2948 - protein, 425 aa, synthetic construct
  source 1..425: note = Description of Artificial Sequence: Synthetic polypeptide
HKVSHTYLPITKLFSFQWQGIQTVRWSSYGFPLSPILAEIFMDNFENQFLESNPLSSKVGYWFRYVDDVLCLWTGTTRQLQTFLKQLNSAHKSINFTMEFGGNCINYLDLTIDISNHCHTFKIYRKPSTTDTVIPAQSQHPVTHKHAAFHSMIHRLLSIPMSKESFQIELNTIRQIASNNGYPLPWWLPPTLVDSIMHKKQKQHVSSLLYPVINTPTSQDHSKWCTIPYLGKVSVNVAKKLKSRNFKTSFYTHNTIGHFLPNGKDNPPALEKSGVYKITCNCGKFYIGQSGRAICTRLKEHHRSWKLRQGNSTFADHLLKEGHSYNVTHEVLHHVQKGRKMNFFEIMEINRHMYTSPNLVLNDQTQFPYSPLLSAEPNHNPVQTMPCADNVNYHLLPTCLIPLLLFHSHVIKALCNHNCLAAYQI

SEQ ID NO: 2949 - protein, 1124 aa, synthetic construct
  source 1..1124: note = Description of Artificial Sequence: Synthetic polypeptide
  VARIANT 251: note = Any amino acid
  VARIANT 894: note = Any amino acid
MDSTAPCKKVLAKEILQAIKTASVDTFEKLALPAIGLLPMANEKENVPTVHKEETTMATPPEETCPQPTPTSASEALSPVETPEPSVQEESGGARASQAIPGVSQETVTASTPKGGKRSTADEAVSSVVSKRKTVPPLRLNDFLVECRKIKKPTKICIPLLHKKKYVEMTSRISYPDESEADSLVPPCKEKKLIFLHTNVQSLKNKLFELQYWLEKLNCSILMINEHWLSCGELELSVPNGYELATGYCRXNKAHGGVSIYINKMLQLNYETLDVNEFCIESHFEVAAVLLTELEIIAVSVYRPPNHSEDLFIENLQKLIVSLLKKKKSQSSNFWRHLSHSSRKKNHRVLIFGDINIDIRYRSSTVTNLLDTLRSLNFYCINDKPTRKNACLDNIICNFHIGRDQFNTIKLAISDHDGLWLRLPLSHKTDTSQQRIIRPINEQKLNTLKSKLTLVNWNELLTRDMGANESTKRFLEVVTKIFEETCPAYYKKHSKNRSQSKPGTLKQWYTAELNNLRILMLMYYDRSQHSNIDRLRYKNIKKYYRSAIKEAKCKSNDDYILNSVNKCKAAWEVIKTEINHQKKDQNIPISPDTLNKYFANPLMENNTEEDVNKAEELLPQLHNKAMGHFEWNHVTCRQVSVAISKLSNSRTEDHYGLSNFIIKQISQEILTPITNIINKILTEGVYPDSLKISVIKPVHKKGSTLSPDNYRPISLVPIISKITEYCMHQQLNNYFEHNNLICSEQFGFRPTLSTVKAVDNIITKVYDCFEKKTLSCATLLDLRKAFDMVSHNILIRKLQYYGIGENALRLLQLVNVNNKKSDPLPVKKGVPQGSVLSPFLFIVYINDLPSILPCEAVLYADDTTLIAQNSDMDELLLNVAVAIENCNNWFQANXLHINSSKTENIIFDLNAHKHENKSVKLLGFHIDQSLSWETHTDKLCSKLARVIYLLHRLRGCVSKTLLLYAYFAFFSSHLTYGILLWGNSPGSKAVFKWQKKAIRCVAGLAPQESCRHFFKEMKIMTVPSLYIYSCLVYVKENLHKYDLRMSVHNHNTRHRHAIDKPHVRLAKVHSSYKYLGPTFFNKLPNEAHSVPLNKFKNIISKWLKSKAFYTIKEFEESTIDDLEF

SEQ ID NO: 2950 - protein, 1743 aa, synthetic construct
  source 1..1743: note = Description of Artificial Sequence: Synthetic polypeptide
MSKLRDGSVLIQAETPAQSRSLLTCDHLGDIPVSITPHKSLNRVQGVIYHRDLLLQTDEELRDNLQRRGVHFVRRVFRGPKDNRVATGAFVLAFEGDNLPEKVKVMMYRCDVQPYIPPPMRCFKCWRFGHMSSRCNAAATCRDCGRPSHPDTACAPPPYCVNCGGHHSPCSQDCPALHKERKIVEYKTLDRLTYSEARRKYEKLHPVSLLTSYAAATTMAPPPVATSRPALPPSVGPMGRPSTSASQTSGGTPSSAGPVLPPTSGVVTPAPQPEKGSPSLASSSGKGTCSPLPTMSPQKSDTSQRLKDPRPESRLAPQSSHTPQAPPEKPPSSGRPKERREDKKEKKERRKAQGDAGGLGAPSPCTGHPSRDARRFGLCRSRGCHGHGGSDFTARDECSCHPSSIFIVFMHRQSGDSLILQWNCGGFFCHLAELRQLLSSFPTLCVALQETWFPGDRTPTLRGYRGYFNNRTVYNRVSGGVCLYVHTSVYSSPVPLQTALEAVAVRVRASRDITICSLYLPPDADVAPADLAALIAQLPSPFLLLGDFNAHHPMWGSNVTTGRGRDFELLFNQLDLCILNTGAPTHFSVAHGTFSAIDLSVCSPGLRPLLNWWVHDDLCGSDHFPIFLSLPHHQRHARLPRWSFHRADWAAYTSAAMLDTPLPADATMAVDQIISVVVSAAESAIPSSSALPRRRPVPWWSPEIAAAIRNRRRALQQYRRHPTVDHLVAFKRLRAQTRRLIRQRKQACWEEYVSTIGPRVSSTQIWTKIRRISGYHPPAGVAGLSIRGTIHTDPTIIAEYFAAHFALNSASTAYSQGFCTLKERAERKQLVFRTNRQEPYNAPFTEWEFQSILASCPNTSPGPDRIHCQMLKHLSVNSQRHLLDFFNRLWIEGAYPSQWQESIVIPLLKPGADPLNVDSYRPISLTNVLCKLFERLVSRRLLWVLEYRGLLAPQQGAFRQGRSAIDNLLSLESAIRTAFARRHHLVAIFFDLRKAYDTAWRHHILATLHGWGLRGSLPLFIQNFLLSRRFRVRVGTSFSSPHIQENGVPQGSVLSVPLFLVAINGLVAAVGPSVSCSLYADDFCLYYSTASTSVAERRLQAAIHRAQNWASAHGFTFSPAKTRVMHFCRQRTVHPHPELYLDGELLQVVDTHRFLGLLFDSRLTWLPHLRQLKQRCSRHLDVLRCLSHTVWGAARPILLRLYNALVQSRLDYGSQVYGSASPSALRVLDPVHHTGIRLATGAFRTSPVTSLLAEAGVAPLRYRRNTYSPSMLPESTVPLGIQITDSFSRGRSFVCRRGDPGRDSRRSGAVTSGLREPGLWLSLPICTESSRPSPPYRHPSGHWSLSYEPCHESSRRGWSRPIAIPAQHLLAQYAARVHCTPRHPNNRLLFPGEVIRLPQRRPRSGLPIAARVQSLLSTLDSFPLNRPFRSTFHAPPWTIPRPRIRLDLSREPKTSTSPLVLRHQFYALLREFRNSEVIYTDGSSDGDHTGYAYMHGAYVEQRSLPPGSSVFTAELVAIYRALKHIRTCPGTSFLICSDSLSGLQALDQCYPRHTLVRAIQESILALDDSGRSVTFIWTPGHVGIPGNESVDQLAKQATTCRPLAIGLPEADFRPLLRNKIRELWNAEWSALDVPNKLRTIKDTTSVWKSSQLGSRRDSVALCRLRIGHTRLTHGHLLRREDPPVCQCGAPLTVVHLLLHCPILAPLRHSFNLPNTLSLVLGDDASVANMVLRFLRAGGIYQLL

SEQ ID NO: 2951 - protein, 1125 aa, synthetic construct
  source 1..1125: note = Description of Artificial Sequence: Synthetic polypeptide
  VARIANT 107: note = Any amino acid
  VARIANT 113: note = Any amino acid
LYLKQPQQLHKVGLPIIHSLVKCLKPQEQHQKIALSLQCKTVSTPTTSPGRHPRRSYASALNTAATTPSSPVNTEETATVAVPSEEGGGKSASFSSKFFSRKQSKEXHNITRXKTLKEVSGSSEVTKSISCNKQNKSFHIMYHNVQSLTNKLQELEIILSSDLNADVICITEHWLEKHQIEALKIPGFHLATSFCRTTINMVGQLFLQNRITWWDSYFCKTEFKAMQSYSDLIKEKVFEMSAIELTDKHLVIVTVYRSPDGDIEEFLCKFEMMLNIVEPTKKKIICGDFNVDFLKSSNYKEELLYITKNFSLIPTVNTPTRITKHSKTTPDQIFIQGTFSSYNSKVVKMGYSDHEAVLLTLELYSEKTPPIKMIECRDFSDGNIANFCNQLSQETWYEIFYETDVNKMFNTFHQTYKYYFDIAFPLQQRKLKPAKNKCWITNGIKISSTMKRYLHSYKKQNHLSLEMQHYIKEYNKIYRKVIKEAKKMGNDEYIRKSKNKIQATWNIVRYETDTKPVAKSISLKLENRQVSEATTVANIFNDFFTKIADDLIQSNFQTPNLHHTVNYKSPKGSMFLKQVTGSELMLAMSSLKKLSCGFDDIPDYIIKQTGYHIVEPLMHIINHSFSTGTFPNLLKIAKVTPLHKKGATDDVNNYRPVAQLSGFSKISLKSSFLIDCQLQACSSAQWLLKNIFEKLFLNRLLEFVNKNSLLSKHQHGFRKSRSTTTAIYEYLNSILKAVDEKEMATGIFLDLSKAFDVIDHGILLHKLERKGIRGISNEWIKSYLTNRQQRVVLKQDTTIGNISRRSTYTSEKTTIKYGVPQGSTLGPILFLLYIDDLNDTVLAKQKTLFADDTSILITGIDQKHLQQSTDTSLLELTHWFKINKLIINTEKTVAMNFHLSHQKQQNNHTLKINNRSLKLVDDVKFLGIYLQSDLKWNTHIKALTSKLSSICYMLRILSTSCNKEIVIQAYHTHFQSAIRYGVIFWGNAPCSHSVFKMQKRALRIICNMKKQESCRPLFPSLKILNLPCLYMFETIVFVKEYLGSTSAYQLNSSVHSYRTRNDSNIHVSYARTSAYQKSVIHIGTQLYNHLPGNIKSIKEDSIFKNKLKSFLMDHSFYSVDEYLSD

SEQ ID NO: 2952 - protein, 933 aa, synthetic construct
  source 1..933: note = Description of Artificial Sequence: Synthetic polypeptide
MATLVKNEILRNVDTITPPTEHVIGIKLGELTLYNVYKPPSQKWPVDVLPKANPQQFMLAISTPNIPDGVTRDPQLKALDPPAVYAGDFNSQHTRWGYPRSSAEGIGLNDWADNQDLHLLFDAKDKATFKSKAWGTTSTPDLTFVTRGATGLPVQGTRRVVEAFPRSQHHPVIVEIGLSIPVIKSPPIPRWNLRKADWNKYRCFVEKTINRIPPKPENYKRFTNLLHKAALNAIPRGSRKEYTPCWTKECETLMEEFEKCGDTETADRLINAMNEERRSRWKEAMENLDFTHSSRKSWGLLRKLGGATIPQRPSLGTTASEISAVLKHTSKIQLKTAEKKEVSRDLSNLLVHNPTNMDIVKEVETEEITQALKLMKKGKAAGPDEILPEFLKELGTLGRRWLAKLCTECISTGALPKIWKEAKVIAVLKPGKTGDNPKNYRPISLLCTSYKLFERILLTRLTPYIEANLPTYQAGFRAGRNCCDQVLSLTTYTEKGFQNKMKTGLVLIDLTSAYDTVWIEGLLLKLTRIIKCKQTYTLLKNMLTGRKIKVSLHGTNSKSVVLNNGLPQGSALAPALFNLYIADLPETKSRKFAYADDLAIAYQSKNFNDLNETLNADLKVLNTYYSKWHLHPNPNKTTSTIMHLNNREAHTKLQLTMNGQQIRHENKPKYLGVKLDRTLSYNAHLEDTKQKLKSRNAILSKLAGTTWGCGASTLRTSGLALVYSVAEYCSPVWMRSAHVAKVDVQLRETMRIISGTLRATPCAWLPVLANIEPPEIRRSQLAIRTHQKILGNLDLPIHEDLRATDRLKSRTAFWKTSEELQEFNSKTAWKELWATSAPKNSNLVDDPNKKIEGFSLPRKLWTTLNRVRTGVGRCKQLMKKWGLTDSSECECGETQTMDHLLACEVYGYNGDLKDIHRLSDSALKWLEKICNVV

SEQ ID NO: 2953 - protein, 826 aa, synthetic construct
  source 1..826: note = Description of Artificial Sequence: Synthetic polypeptide
NWNHIPLITTTQRPRWNFRKAKWDIHPEKLDKCLGWIHPTANNDRFMGAVKSAAKAAVPRGFRKQYVRGWDKECENKYQRFLESGDPEIADDLLHSLDNARREKWIETVESLDFKTSSRKAWSLLRKLGGANKLHHNSTDISANRISAHIQATSRAPRDKKHTRTIRRELSFLKKNSTPLDQYSSKFTTTEVREALKSVKAGKAPGLDGVHPEFLLTVGNMPKNGLLNFIQMSQRSAEECQGRKGTWIGWSTPRIPSYCGEYAKKWLAEFYSDVMATGNIPQKMKNSKIIALLKPGKPSNQPKSYRPIALLSVLYKLLERLLYNRLSPKILESIPDEQSGFRPNRSCTDQVLSLTTHIEAGYQKSKKHQLHLSSTFPDNAYRGRLSKKQKTSIAFIDLSAAYDTVWIQGLLYKLIKIIPCSSTIRLINNMLTGRAFQVITGERTSSTKVLNNGLPQGSVLAPLFFNLYISDIPNTQSRKFGYADDWAIAAQHESFEATEDILCSDLKLLCGYFRKWRLQPNPTKTEVSSFHLCNHSARRELNVIFEGKRLSHNNYPKYLGVTLDRTLSYKEHLTNTANKMRTRNNIIHKLCGTTWGSTANTLRTSAVGLVYSVAEYCAPVWINSPHTNRIDVVLNDTMRTISGTIKSTPTVWLPTLSHIPPPEMRRKNALLREYNKITNNPQLPIHSDVADLERRRLKSRRPALLSAKEMMNTNFEVEDLWKQHWQEHCPPKCQSFMTGEKPPGFNQPRKVWTTLNRIRTGHGRSADAFYKWGKTPSPNCDCGAEKQTVRHIVEECPFRAYKGTFNDFLAATEEAINYIKCLDVNL

SEQ ID NO: 2954 - protein, 893 aa, synthetic construct
  source 1..893: note = Description of Artificial Sequence: Synthetic polypeptide
PPPVQISSIHSTHQPNPTKPSKPGPNSLAAPHLHRKILLLCNPKYLHPIPQTDVLALQVLEQHSHTTSKKLSNLFTSYSRLGLPLSTPSTTSRHTPQPLIADKPCLADLLHLPHPQKLPHTTTQNPQPKQTVMNLSSKSLSPIEVSVLSKGLTFCPTPKFNHAGLVKDLLSFSQSLQWKHHFATNPTIQTHTNTNIEPCLTQFTPPSSQDPPTLPPNHPLLTFQNFLTSNLASPSFPKSLKMDTNLTPSERNAIYHLKTDPDLMILPADKGSTTVVLDRKDYVAEGLRQLSDSSTYTPCHNDPIPKTQQDLQSLLKSLGPSQDLSPESISLLTPPTPRTPTFYMLPKVHKPNHPGRPIVAGYGAPTERISALVDQHLQPITHNLPSYIKDTNHFLHRLSTVPVPLPPGTMLVTVDATSLYTNIPNAHGLAAVEHYLSQCPTDCKPTTSFLVTLTNYILTRNYFSFEGITYKQICGTAMGTRMAPSYANLFMGHLEESFLTTQNPKPLIWFRFIDDIFIIWTEGEDTLSTFLQNLNTFSSIHFTWSYSTQRATFLDVDLFLKDGLISTSVHIKPTNHQQYLHFDSCHPFHTKKSLPYSLATRGRRICSDKQSLSKYAKRLTEAFTDRNYPPNLVQKQISRALSVQSPSSSPTPTVRPQRSTPLVTQYHPGLEQLNQVLRQGFDYLSSCPEMRNTLPNILPTPSYSGIPPPTKPTEIPYQISSPPPPTVVFRRPPNLRNILVHPYSIPAPNPLPHGSYPCNRPRCKTCPIHHPTTTYSSPVTGISYPIKGRATCESSHVIYKLSCNHCAAFYVGMTSTQLSIRMNGHRQTVARRQLDHPVAEHAALHSVTHFNDCYTACAIWILPTNTSFSELRRWELSLQYILHSRNPPGLNLR

SEQ ID NO: 2955 - protein, 1088 aa, synthetic construct
  source 1..1088: note = Description of Artificial Sequence: Synthetic polypeptide
MKIIGTAELAEEATLQLNVQVVEDDAPLMAANMVRWYRAAAGTSIELMHRANDASDGSRSKTHGRNQSCFRWIKIEDSWAKPIIVWFFGHDTAMWKGNGKTTTLLYFLNVGRRRIMMAFLGVKYSGDKLLPRSDLRVGSISGGVIKRDEHFNLRIGTWNVRTLQRAGKLENLKREMDKCEVNIMGLSEVRWTDSGEIVSGNYTMFYSGGKSFERGVAIVMGNELVQSLTKVVCHSDRLMFVKISAKPVDILIVQVYMPTSDHEDEEVEKMYDEIEDIIQSEGTGKVNTIIMGDWNSVVGQGNEANIVGQYGSKHSWTIWLGKRNDRGGMLVEFCQRNNLVVMNTWFKKRKSKLYTWKSPGDMNRYQIDYILVKQRFRGSVKDAKTMPAADIDSDHNLLVADISTRMKKIQQHGRRKQRWDLEKLRENNVAVRESLEKKFNEDEIRASAEEQWQNVKMILLNTLKSEVGRETKRARKPWITSEMLEKMEERRKCKNVNERNTEDRNRGTTKKRKVRPHVPENEGTGEGENKSVRTFGIEDSRGQVVTEQVEVLKTWEEYIRELYDTEHRPHDIDIEPEEAIDEDEKGPSILTSEVEKAIKDMKSRKATGDDDIPVDLLKDIGNDSLKALTQVINKIYETGEWPKDFLDVTMVTLEKKKQAKKCSDYRTISLISHVAKIIARLLNRRLEHKIEEVMGEDQFGFRKGKGTRDAIGMMRILSERVLAVNEEICACFIDWQKAFDRVNWNILMNILKEIGINWRDRRLIRNLYLGQRVKVRLKCGETNSVEIGRGVRQGCCLSPSLFNLYGEMLAREALKGCGNFKVGGRLINTIKYADDLVVLAKNQRQLQHMMNRLVEMGRKYGMEINIEKSKVMRISKREKHLKIIVDNRELENVNQFKYLGCFITKDAHCTNEIRARIAMAKAAFNKKRTLLTSKLSLALRKKLVKCYIWSIALYGAETWTMRKKEKKYLESFEMWCWRRIEKIKWTDRVTNDDVLRRVGEKKSILRTILQRKANWIGHILRHEGLIHDVIEGKINGTAGRGRRRIQHLDDLKDGRSYIRLKEEAEDREHWHHKFSVRRHGPATRQNTT

SEQ ID NO: 2956 - protein, 645 aa, synthetic construct
  source 1..645: note = Description of Artificial Sequence: Synthetic polypeptide
  VARIANT 40: note = Any amino acid
  VARIANT 531: note = Any amino acid
EFAGRRKLGVLPQTRGTPLSFLKTDYDQKICQLLEDPAYXLLENDPTDKVDRKTRSLLKETGWPEKVVKQLRAKAPVPPRLYGLPKVHKQDVPLRPIVSNIGAATYATASHLKKMLAPYVGKCVHHIRNSTDFVERLKNLRISNTDIMVSFDVVSLFTRVPLQDTLDLISERFDGTVLDLFKHILTSTYFLCGGQFYEQTEGVAMGSPLSPVVANLFMEKFEEEALTTAAYQPTCFFRYVDDTFVIWPHGQNRLDEFLDHLNSRHPNIKFTMELENEGQLPFLDVLVKRKPDGTLGHSVYRKPTHTDLYLQADSCHHPAQKNGVLRTLVHRAKTLSDSDNLAAELDHLQRVFTNNGYSSRDIRKALHPTRRPDTTGEERRRDREGSLPTICRAYICQDQQNLEETQNQKCFLPTKQDQQSWIISSECSQTTATRAETSARRYTPPDAQIQQEKKEEETGKVAFLPYAGPISAKISRILRKHKIKSVFCPPNKIRALIGGVKDDLGLRKPGIYQIPCECGMSYIGQTTRTVXIRCKEHQRHTRLRQATKSAIAEHCLELDHTMDYDKTRILAQTPRFWDSIITESIEIKMGEDLINREAGYQLSTAWNPALELLQKQRKKGHPPVELQTTTRDSSSGWPPCAPTTA

SEQ ID NO: 2957 - protein, 678 aa, synthetic construct
  source 1..678: note = Description of Artificial Sequence: Synthetic polypeptide
WNKHFARCLVNYRQIRRETSHSIQATKTEHDKSRTQWPSELRNDPLIVVLPADKGNAAVIMERATMTRRFERCWRRRHMQKLSRDPTSKILRKTSELLKRSSLEDSVIKNLLPQAPRPPTLYGLPKVHKMNTPLRPIVSTIGAPTYRLAKHLANLLTPHVGHCEHHIKNTADFISRIKCLRLGEEDMMVSFDVVSLFTNVPVKDCIDLLSQLFDDTVVDLFKHTLTSSYFLYGGEYFNQTDGVAMGSPLAPVMANLFMEHFEDIALDTAPVRPSCFYRYVDDTFVVWPMDVKNSVNSSTTSIASMTRSSSRWRWRKRVPCRSLTSSSAVKQMDVSAMVFTENPPTQTGTCTPQAIIIHRRNSLFHVRCLAHGREKLGEFFDHINSIHDKIKFTMEVEKEGALPFLDVLVSRKANGCLSHGVYRKPTHTDRYLHATSHHHPSQKQSVLRTLVHRAEVVSDTENLQKELSHLRKVFRDNGYSNSQITKAIFPKTQKQKTPEEDSKKLAFLPFCGSVTGKISRLLKRHKIDSVFRAPSKIRQLMRPVKDDVGLRTPGVYKIPCGCGQFYIGQTVRTIEQRCVEHERCYRLRYPEKSAIVEHALENRHRIAFEETSIITRTNSFWDSVIKEAIEIKIADNTLNRDGGLQLSTAWNPAIGRLKRARQARDQNIAFYGHVAEHQ

SEQ ID NO: 2958 - protein, 925 aa, synthetic construct
  source 1..925: note = Description of Artificial Sequence: Synthetic polypeptide
MRIGTWNVRTLLKAGKLEEVKMLMEKSQLDILGICETRWGGNGDFMSGDFRIIHSGSARSGRNGVAIILRGKWKNNVLNTYHCSDRIIMIKIKAQPMDLCVIAVYLPTTNSKDEEVEVVYEQIDDLMKLVKEKDNLIVIGDFNASIGEDKKGLWNGKFGLGKMNSRGERLLDFCEQYEMIVTNTCFEMPKRRRYTWKSPVDGERYQIYILVKKKFINQIKSSHSYPGYDIDSDHVLVIADYNSKFKKYKRTNQHRWCVEKLKEKQVAADMKELTDNLIGNREGWEGFKETVEVAAKELVGLRKLEPRKPWMTKEILDLIEERNRLRKKDFDKYKRVKNAITQKCRLEKEKWMHDKHKEIQQDLSGGQTDKAYSKIKTMQTKTRTKTNMVKNKNGDLLFELEDVCERWKEYIEELYEGEDIANEGEILEEENSVDIDMIGPPISKEEFNSALNDLSNGKATGTDNIPAEILKEIGDQQKSTYINFTFKEYYEDGKEPPTDLLNSKTVIIPKKEMLWTVKQEKTNLVSDLEKAKAILALRMVLERRIGVNRKTYLTFIDLQKAFDMVNLEGQRLIWNLYKRQEAEIEVNGVKKKAKIRRGVRQGCPLSPYLFNLFIEKAIEKLKRITKGIKINGERIHCIRFADDIVVLADSVRKWSLCCLSKEMEFMLLKFAKILREFNLKINKKKTKTMVVGKTKEKGKVNIKLEDDVLEQVENFCYLGSTITDDNKCITDIKRRIAWQSKLSKIKGIYMYHRYKEKNSLAKQAFQNKRNLLTDNHISLESRKKFAKTFVWSVLTYGCEAWTLGKAEKKRLEAMEMWIWRRMTKTSWVDRKSNEQVLREVNENRTLLNYIGRRKSKMIGHIMRHNQFLKNVFEGKVLGKKPRGRPRATYFNNIKEDMGIKSYEELKRMTMERGTWLNRQGIAFSL

SEQ ID NO: 2959 - protein, 584 aa, synthetic construct
  source 1..584: note = Description of Artificial Sequence: Synthetic polypeptide
ASVSRIPEDQADEIRQEVAYKLRRAPPPRSNIPSSERAAIRSLREDKDLVILPADKGNATVLLSRGDYVSKMNLLLDDSAYRRLRNDPTERIKRKTFHFSHGTNKTEDLSLLKKSSLSEDVVKKLHPGAAVPPRLYGLPKVHKHGIPLRPIVSNLGAPTYNLAKYLASVLAPHVGKCEHHILNSSHFIRRLKSVCLGPSDLLVSFDVVSLFTRVPLEESLLLISDKLDDETVKLCRHVLTSTYFLFNDAFFEQTDGVAMGSPLSPIVANLFMEDFEDMALRTSFLKPTCFWRYVDDIFMVWPHGMDALNHFEDGKLPFLDVLVQKNSDGTLGHGVYRKPTHTDLYLHATSCHPPHQRMGVLRTLVKRAYAISDAEHLGEELEHLKVVFKQNGYTAQQICRAFQFGPKGEPLEDNYKSIAFLPFVGNISSKISRILRRFDIKSVFMPPPKTRALLGSVKDDLGLRKPGVYRIPCYCGKTYIGQTIRTVQDRCVEHHRHTRLLQPEKSAVAEHCLNEGHKMLYDETKLIAPASRYWECVLKESMEIRMADNIINRDKGFPLSKTWNPILSDIKQQRSSFRPAVSFN

SEQ ID NO: 2960 - protein, 690 aa, synthetic construct
  source 1..690: note = Description of Artificial Sequence: Synthetic polypeptide
  VARIANT 543: note = Any amino acid
MNKELTSKLHEYLRLFDEDPFSTDTIRSGMTLSQELAKAKQKRWSEMVESMDMSKSSRKAWQLLKRLSNDPTTPKERFNVTPNEVAHQVLLNGKTEGRKEKIRITRHNLETNDLSAKFTLEELKAAIKMCKSGKAPGLDDILVEQIKHFGPVTMGWLLRFYNNCLTRRHIPKIWRRTRIIAILKPGKPASDAKNFRPISLLCHLYKVLERMLLNRLSPVIEPQLIPQQAGFRPKKNCTAQILNLTQNIEDGFERGLITGAVFVDLSAAYDTVQHKIMLHKLYQLTRDYDFTSFIGTLLQNRKFYVELDGKKSRWRIQKSGLPQGSVLAPTLFNIYSNDQPQPPNTKSFIYADDLALVSQAKDFETVERHLTYGLKTLSAYYEKNHLKPNPAKTQVCAFHLRNKDANKKLKVIWNGTELEHCHNPKYLGVTLDRALTFRKHCLNIKQKVSARNNIIRKLTNSGWGAQPTVLRTTAIALCYSAAEYACPVWYTSVHARHVDVALNETCRITTGCLRATPTHKLYNLAGIAPPDIRREVAANIERXKVEQNAAHPLHGHQTPPSRLKSRKSFMKTTVNCSTSPSTARQNLWTTRNADIATWIPPLEALPPGENLPWKTWKSLNRLRSGVGRTKDNMARWNYLGDESTLCECGSEQTTKHLYSCPQCPVSCTLEDLLQAKENAVELANFWSDCI

SEQ ID NO: 2961 - protein, 1547 aa, synthetic construct
  source 1..1547: note = Description of Artificial Sequence: Synthetic polypeptide
  VARIANT 97: note = Any amino acid
  VARIANT 116: note = Any amino acid
  VARIANT 299: note = Any amino acid
  VARIANT 329: note = Any amino acid
MKKRVDGELVKSDSFILTFNSPRLRTMLRQASCVSQTPDHVKAGFLRLNVRPYVPNPMRCFKCQRFGHTTLGCKGRLPVANVVRQPMMGLTVLHLRXVSTVQGTTQSGVGIVQCTXRRRKYRKLRPQGVSPMQRPKRSSRPCNLLYFPPPSLQYCKNQLLKLMPPPRLRLLVWAPTPALASARVRQQKLQLRSPTDNADKATGTAFAEPWFHNCRACHHVTATATTPPTPPPHHSCNHNLCLHHQATLQSLPSRHRHRHNPTNATTSPQLQPQPLSPPPSHLNPRRLPANTVTGKTVIXLSDFVEVIPPEPSSDPAPELMELDLPQGQXSRPNTEPPPRSVSPSRKKERVKIQPPRSNLRDRWPQYCSGTCRVSGRMWRNSVILTQGRPICICLQETNFKSTDNPELRGYVLHKKDDLSGERARGGVAIFTNTAYHSEPLSLTTHLQAVAVSVMCVTVAPLSHHTFTSRCSICYVRHRLTVCSLYLPPHDTFDVAALEDLLTQLPQPFILCGDFNAHNVLWGSASTCPRGRATERLLLSSSAHLLNTGQPTHFCTATGSFSAIDLSLCSPALAHTTQWEVVDDLHGSDHFPIWLHLPDRVEPECRPPQWVISKADWTLFSQLAELETRDNVQEWVDCITQTIHSAAEASMPLSLGQPKRQPVPWWTAECRSAIRARRAALRRFKSRPTADNLAAFRMARAKCRQIIRESRKRSWQQFLSTVTRSTKSSTVWETIRRISGKGGRCPVAAVMGNGVLHTSPRDIAQTMAIYFANVTATAHQDPAFQRHRVVAERGNLDFRSTGHQDYNCPFTLWELDSALSVARDTSPGNDRIHYSMLRHLTQRNKEILLNLFNAIRPGHFPDSWREAILIPLLKPGKDRTCPSSYRSVALTSCVGKTLERMVNRRLVWMLESRQLLSRFQCGFRRYRSTFDNLASLEAAIQQAFLRRHHLLGVFFDIEKAYDTTWRHLILRQLHEWGFRGCLPIFIRSFLSPRYFRYRVGGVLSDRFEQENGVPQGSVLSVTLFAIAINSITSVVKSPVQCSLFVDDFSVFCSSSSLATTTRQLQLTLRRLDEWAQKTGFKFSTEKSVCVLFNRSRSIFNLPELRMRDTVLNFKDTVRFLGLTFDCKLTWLPHLKDLKRRCLKALSILKCLSHTSWGADRTRLLQFYRAFVRSRLDYGCTVYGSARPSYLKMLDVVHHEGIRLATGAFRTSPIPSLCAEAAEPPLSIRRQLLMVRQAYAALSTPYTPAYNTVARPPMERLFRNRLRATRPFGIRAKDCFLDMGVSDFTVLRRGWSRYPPWLLQRPSLLLDLTSFKKDCTPDITFQSEFFNILNKHRDCTVVYTDGSKQGDSVGCSAVFPGHIVGIRLPAAYSVFSAELHAILQALEHIRRARGTKFLLCSDSLSALQSLLVMYPAETITQLIHDQLYLLQRRGKEVSFLWVPGHVGIWGNEAADVAAKAACSDPNVTECAIPLRDVYSVLRQRSLQLWEETWLAVTGNKLRLVKPTVRPWRTSCQPFRRFEVTLTRLRIGHSPLTHSFFIPSGGSTDL

SEQ ID NO: 2962 - protein, 498 aa, synthetic construct
  source 1..498: note = Description of Artificial Sequence: Synthetic polypeptide
  VARIANT 281: note = Any amino acid
RNTNSELRKSELKDPGRYNYLGIVTIGLLQDLPNTCTLLSMHVGHCEHHIKNTADFIDRIKGRRLREEDIMVSFDVVSLFTCVPITDSIDLLAQLFDDTIVDLFKHTLTSSYFLYGGDYFNQTDGVAMGSPLAPVVANLFMEHFEEIALDTAPAKPSCFYRYVDDTFVIWPHGQKKLLLSLRRRYLRHLASWTEKIEEFLEHINSIHGHIKFTMEVEKDGSLPFLDVLVRRKPDGSLGHSVYRKPTHTDRYLHATSYHHPAQKQSVLKTLVHRAETVSDAXNLSNELSHLRKVFKDNGYSKRQISQAVSLKARNQKTSEEEVKKTAFLPFCGSTTGKISRLLKRHKIDTIFRPPAKIRQLMKPVKDDVGLRTPGIYKIPCECGQFYVGQTVRTIEQRRIEHERCFRLRYPEKSAVVEHALENGHRIAFDETSIIKRTNSFWDSVINEAVEIKISENTLNKDGGLQLSTAWDPVIAELKRARRTRDQNIALYGQGTGHQ

SEQ ID NO: 2963 - protein, 581 aa, synthetic construct
  source 1..581: note = Description of Artificial Sequence: Synthetic polypeptide
SPIQSHGFKPRAGGSPGKCAYKQSGCFDGIYPEFLKNAGPKTKRWLLQLYNIILTTGKLPTTFRAAKVIAVRKPGKEGSEASHYRPISLLSVVYKLLERMLLNRIQPLIDKATPLHQAGFRKNRSCCDQVLALTSFIEAGYQRKLKTAVAFVDLTAAFDTVWRHGLLLKFAEAIPCQKLVNLMDSMLSNRRFQVFLGDKGSRWRRLNDGLPQGSVLSPTLFNLYTSDMPNTSAKKIQFADDLALAYQARNLEECEGTLTTDLHIMGDYFKSWRLKPNPTKTEVNAYHLNNREANRKLNVVFENVPLEHNPYPKYLGVILDRALTFKNHLEYVAKKVNTRIDIVRKLAGSGWGANADTLRTATLALVYSTAEYCAPVWKNSAHVRKVDVKLHQAMRIISGTTKSTPLPWLPVLCNIPPPSIRREAAAIREFHKSSTHKNSLLYNQLRNIPTSRLKSRKPPWPMQDSPLVYDVCQEWKDVWKKFPPANSRLITDPTKRVNGFGLPRKLWTSLNRFRTGHGRCSACLYEWGYKDAPACDCGAPVQTMQHLIEECPPRKFPGGLSELHLVTTRAVEWLRDLDVQL

SEQ ID NO: 2964 - protein, 495 aa, synthetic construct
  source 1..495: note = Description of Artificial Sequence: Synthetic polypeptide
MNPQPPKLRSQFKVHKLNHPIRPISNSLNSAYHDLARFLHETLKKSFVFQNNYSVPNSHVLVHKVKDLDCGPDTKLFSLDIKNLYTNVPVVETLKIVEKNLCQFKKLSSEQITDFMNLINVVVKYNYFEFNGKLYQQDDGLAMGNPLAGILADIFINSLEEKFFHKFSTTTLGIVSYSRYVDDILVIYEGPTTGIDHIFTLFNGLHENITFTCELENEARQLNFLDLTLTVEENKISFNIYRKETYTDQIVPASSMHPQCHKNAFFHSAIHRAISIPLSKEKFEEEINLIKTIAVNNEYDPAIVDNILKKKTAKRVTTLGTPIESDQKKKYFSIPFLGPISYQIQRLLRNKYNCNVAFSTNNNLKKNFIHNLKSTCSPLDNSGVYKIVCDTCSSYYIGQTGRAFKIRFKEHLLRKNGTNPQNSSFADHLLITGHAPKAIHDLNILHTEKKGHRLDVLEELQIFKHFSRNDGLILNEQLQLRNRSFFNGIKPLLGL

SEQ ID NO: 2965 - protein, 743 aa, synthetic construct
  source 1..743: note = Description of Artificial Sequence: Synthetic polypeptide
MGNAVVVKVHGSRETQESTRCSPGTTFNQTDIGNHRGMHRLIAAGRLQGGDRSLYGKMEYTRDPEEGKALKTQCFQIEGKGAKPEASGGSTIKEALQETAEEVLGLEERVKRADGTMKIVKRLWKKEMRQGRKGKEENDKQDNKIYYRKFMKKRKEADRICRRKKRELERDGLWSRGMDYGAREEYNDEEVRKFYKKVRELKKGFQPRTLQRRKASNHVLCRDKEGNFIGGEEQVLDQWAKYFSELLNVTTEREDKMSLQKEKTNETEGDQPWQNVSQDERPVPIPTIEEVRKAIKSLRNNKAPGNDNISAEMIKGRGEHLTRLVHQLIVEIWEKEEMPDQWNMAIICPIHKKKDKANCENYRGIALVSVVYKVLAKVIAMRFAPITEEILRRLPVRLSAGQINNRPNFHYKANNGKVLDLHQLQKKYSGDYQCGFRQGRSTTDQIFIIRQIMEKCYEYNVDVHQLFVDFKQAYDSVKRKKLYQTLMEMEFPSKLIRLVQMTLTSTKCQVKIEGKLSKEFEVNQGLRQGDVLSTLLFNIVLERVMRRVEIDNPGGTLFNRMNQNLAYVDDVCMLSRRLKELEEGFDRLEKEAEQLGVNNTKTQYLFASRKNAVVKEKYIKLNRGNYERCEKFQSWGAVTEDSRQIREEIKSRIAAGNRAYWAMIKILQSRSLSRKSKVTVYRTVIRPVVMYGSETWTMTVAEEELLRRWERKILRKIFGAVIEVGQWRIRRNKELEELYRNLT

SEQ ID NO: 2966 - protein, 721 aa, synthetic construct
  source 1..721: note = Description of Artificial Sequence: Synthetic polypeptide
  VARIANT 623: note = Any amino acid
MTIKCKNKMYTLVNAHAPTNIDNKKNPTKVQTFWEELEDTIQKIPKENIIILLGDFNAQLGKERKYKNIIGEYPAHKRTNNNGIRLVELCQVFNLKIMTTHFKKHPKKMKTWKAPNQLLGEFQIDHIAISRREFKTIQNIKVQKGAKIDSDHYLVKSKIKFIPNSVKNNKKPTRKNFETNNIDADTKNIFKSKLQGETWEEMKSQIMKAAEESLPTKIKRKNIWWNDKCNEALDNRQTLWQKFKSNPTQINLERFREGRKIASYTIRNEKRLFEKLSLQQIQVHFTQHKSRDYYQSFKRHLNGYEPPSLNFRDKSGKLGTNDQENCNILAHYFKDLLNCKAPPEKPEFKTTEEIPAESHPPSLDEVRQAIKSLKNNKSSGEDGITAELLKLGEEKVTLHLGTIIKEIWQTEKIPEDWRTALIHPLHKKGDRSDVNNYRGISLLSVPYKVLSKILLNRIEPVLDAQIGEYQGGFRKGRSCSEQIINLKNIIRTRAGQPHVTTFIDFRKAYDSIDRESLIRTLEEFGIDRKTREIVKQTLTDTKSKVKFRGKISDPFKIQTGLRQGDGLSPILFNITLEKIIRETLAEYTQEKVKGISFGGSVKGLTIHALAFADDIALLSTNIXDAIKQIEILAKHAAKFGLQISQEKTKFMSNKFKEVNKLHTIIGCIERVKHFKYLGETITDTGTEKEAVKLRVAKLRRAQILTMKLYNKKCLSRNAKLL

SEQ ID NO: 2967 - protein, 1306 aa, synthetic construct
  source 1..1306: note = Description of Artificial Sequence: Synthetic polypeptide
MNRDCDCCVRMQSELVTLRSQLQAVLTSVAQLEAAIEGRRCCWPVVGTERTPVVSTDRPAPATCPDTASSEADTPPVVAWEVAPVRGRRRKTFRGTDREASPVRLANRFEALSVQDNVPESDGVSHPEVTTQPARSGLSQRWVCLRDGCQGGEEGQRALRVHTGGVIPDVERVLPDAMKGTGCSQLQVVAHVGTNDVCRFGSEEILSGFERLSEVVKTASLACKMKAELTICSIVDRTDCGPLVQSRVEGLNQRLRRFCDRVGCRFLDLRHRVVGFRVPLNRSGVHYTQEAATRVAGAVWRGLGGFLGVRSPLYAGSGYTGSGGCVAWTGRFFRIKSFGEIENGQSQRVQVDHRRNVDPETIGITVVNCRSCVGKVPELQALIESTETHIIIGSESWLKPEISSEEVFSKDLTVFRKDRLNKIGGGVFVAVKSSISCSEVEVDSSCELLWVEVVPENRKKLIIGSFYRPPDSDDTIAERFKENLSLITKTYPTHTIIVGGDFNLPSICWQNYIFKSGGRHKTSSENALNAFSENYFEQLVHEPTRIVNGCENTLDLLATNNPELIMSIKTDTGISEHRAVVAKLNIESPKVTKNKRKVYLFRKADRNKIHCFLKDSFHSFLTLNVGVDQMWLKFKEVVSTAIESFIPNKLIKEGGDPPWYTKQVRTLLQKQRKRHTKFKRTRNPQDWRSYTEARNLARTSMRDAYNTYHNETLSRNLTENPKRFWSYVKYTRGKTQTIPSLRDSNGDPADDSATKAELLNIAFRNSFTKEDETNIPDFELRTEARMSNVEVDIIGVVKQLKSLNKNKSSGPDCIPIRFLSDYAEAIAPYLTAIYNRSLKEGSVPKDWKVAQVTPIFKKGSRSNPLNYRPISLTSICSRVLEHILYSNIMNYLEQNDLLTQGQHGFRKYRSCETQLALYSHEVMSAIDKGSQIDSVFLDFQKAFDTVPHKRLLIKLRGYGISPQICDWIGDFLSERTQFVVIDGKASTKTEVISGVPQGSVIGPLLFLIYINDLGEICYWSSAVPYLHKRFRGNLSSSLRLFADDAVIYRLVKSSEDQNQLQNDLNKISLWCKNWQLTLNNEKCEVVHMSTKRNPLNFVYKINQSKSRPHEYEKKSVKLCLQDKSIKVKAVNSTKYLGITITSDLNWKEHVDNVVGKANQRLRFIGRTLKRCNRTTKETAYTTLVRPFLEYCCPVWDPYQVGLTEDIERVQRRAARFVLSRYRGDSVTEMIQDLGWESLQQRRLSLRRGLLTKLQSPTFSSECENILLTPTYIGRNDHQNKIREIRARTERFRCSFFPRAIREWNGR

SEQ ID NO: 2968 - protein, 983 aa, synthetic construct
  source 1..983: note = Description of Artificial Sequence: Synthetic polypeptide
MMTGFVTKQSGGKIVPNSDLRQGTVSKCVIKDDRRQVRIGTWNIRSLSICGKLENVKKEMEEHDIDILGISEIRWPQKGDFWSGNFRIIYSGKEGSYAGVGIILRKHVGTRVKSYVQYSDRIIMLRIENDPIDTVIIQVYMPTSSHADEEVEQVYEQLEEIMEMVKDKDNLVILGDWNASVGEGEDGNTVGKYGLGRRNDRGQQLVDFCKEKELIIANTWFQQPKRRRYTWIAPGDRARYQIDYIMVRRRYRNQAKQCKSYPGADVATDHNLVMLKSNLRLRRKGQNTKGYCKYDVKKLRQDSVKERYQKQAQQKVKEIPNGTVNEKWIGLKHSILQAADREIGNIKKQATQPWISDHTLELMEERKKFKNSKSEEGIKSYKRLRNMVNREAKKDKEEYIMRRCKEVEEKLEKGNIETAYELIKKQFKKVNGRSNNILDENGKRLFENKEVGERWKRYIEKLYEDPDEISNLENEETVTKDQLGPSLTKEEYLKAVRELKNNKAPGCDALTGEMIQGLDNETHNYIFKLIQDMYETGEIAEDFKKTIIIPIPKKPGTIKCEEHRTLSLISHMSKILTKIIYNRIISKIEQNLDEDQFGFRRNRGTREAILMLRQIMDKMLDLKRPLFIAFVDLEKAFDNVNWNLLMEIVTNVGLDFRDRRIVHELYKNQRGVINIHGEIQEAHIKKGVRQGCNLSPVLFNLYIEEGIKECKESMEGIKINGVQIKMIRFADDIAIIEESEENLQKALSRMNEILPAKYNMKINTKKTEIMVCSHEQITTDIKINDVPLKQVNVFTYLGSKITPDGKSSADIKSRIAQAKLAFNNKRMLLTSRNIKEETKKAFIKCYVWSVALYGSETWTLGVCDKRRLEAFELWCWRRMQKIPWTAKMTNEEVLRRIGEKRALVKTIMKRRDKLIGHLYRHNEFIINVMEGMVEGKRGRGRPRLQYLKQIQRDIGVESYQEMKRLSENREVWRRRIAANQSSD

SEQ ID NO: 2969 - protein, 1308 aa, synthetic construct
  source 1..1308: note = Description of Artificial Sequence: Synthetic polypeptide
  VARIANT 269: note = Any amino acid
  VARIANT 310: note = Any amino acid
  VARIANT 342: note = Any amino acid
MIEEQERLICALQVQLKNAEEELGRLRRGRGAGEWELAVGKKVARRRYSDSFTLQVANRFDQLSELSGDEPPVAVGVGSTQQTSAFGKPKSVERSLRKKKVLLLGSSHGRGVGQQLQEVLGSEYQVTSIVKPSAGLDQVTCNIGDLCRNFSKEDQVVIVGGAGNSLDRDGEYDIGGDLERIATQTGGTNVHFVQLFQRHDRPCLNTAVSRVNMGLEKALMTEGMDHIAVVPVETIQRSDFTRHGLHLNRYGKGRLAKLIGDSVVGGGGXTHGKIPVVVGVRAAPFLDGCTFFRLKTADRYSCLKEVPLRXEPPLTKSKNISNKGITVFHQNIQGIRDKVNEXLIDTDSDIIGISEHFLSGVTIQRLPLPGYRLAAFYSRSSLQCGGVAMYVKKRFFIGVNRFFKNDFSSESIDFSKHCTEQIFECCAGVVNVNGTKLVIVVIYRSPDSDFKMFLPKLELVLGSLYRKYKNLIVCGDFNINCVGDSSRKSQLLDLFNSYNMMQTVFFPTRVQGNSSSTIDNIFVHSSLLEGHSVSRIVNGLSDHDAQLLILKSICSQTNVKHKYQLLRKGKVFVLKQMLNININYSEKVNPVAIETFLSLIKEQEWQDVYSADNADDKYNAFLNTFIMLFESCFPLERSKQGTSSNRQPGWLTKGIRVSCRTKRELYQNVRSSQNEDAVAHYKQYCKVLKNVIKNAKSMWYAKRIANSRDKIKTIWSVVKEVSGQQQQVEDITSVRSRNVSVTDKLDICAIFNNHFLNIVGELNKTLVSTGNHITFLENAFPRLLPEMVLHDTSIGEIESIIKSLKTKDSCGYDGVSSRILKYCSPYVSPVLSHICNFSFQNGQFPDRLKYSVVKPLYKKGERDNVDNYRPISMPSVFSKVIEKAVYSRLIDHFSSHNLLSNVQFGFRSGLTTENAIFSFLCEALDGLNKRLRTLGVFFDLTKAFDCVDHKILLQKLEHYGIRGVAHNWFTSYFNNRQQKVILRSVENGYDVQSQWGTIKCGVPQGSVLGPLLFLIYINDMPSSITGDCKIFLFADDTSLVVKDVARNIDTVSNNAVQEISSWLVENKLMLNHSKTQFLQFLTHNLTKADILITHNGHMISETEQFKFLGVHIDSKLSWKAHVQDLVPKLNSAIFTIRTISEISDFSTRKVVYYAYFHSLMTYGIVFWGNSPDAKRIFLAQKRAVRAISGVSSRTSCRPLFSSLGILTLASQYVFSLMSFVVNNISLFPRVSSFHSVNTRQKSNLHLHHTTLTLVQKGVQYSAASIFNKLPQELKNLSTNPHAFKSKLKSYLMAHSFYSVEELLEKLNN

SEQ ID NO: 2970 - protein, 990 aa, synthetic construct
  source 1..990: note = Description of Artificial Sequence: Synthetic polypeptide
PPSVVPIMAGSPHRILYHNIRSLPANKPLFMHTLSQHCVDAFLLNETFLQPRHSVSTTPYTLHRTDGPPPLARGGVAIGHLRHHPVRPQPPVNNPAEHLILTLFLPSLTVTLATIYIRARVPIPYDFISHIDNSFTTYVIAADLNLHSRSAAELQRWHQFLPTLRGDLVPLPSPTRPESNTTPDAVLVSPNLWDACRRKSLTSLAVTTPPYSSPSTPAAVPAAPPVLCPLLGPLGRLQAEVLDLIGSDHAPVLLTFNPRGRPGRATRPVPPPRLVHDYSRADWDAYRRSINTSVASHPLSLHTPDDIVHASSFLHQTVADAVATHIPTKAIHPHRPPLPPQAVLLLRESRRLYRSFLRTRDRDTLLRHRQLQRHIRNLLNAKKRRDWRQTCTRLNATLPINSSKYWKAFHRLTGSHSVPAYPLLHNNLPLPDNASKAQLFADHLSNIFDLPDNPRFDYSRFPDVHERTDTSVPPLAPGFQYLDHIPPSDLNTPITAQDIVHTLRTKRNTAPGHDRITYRHLRACPPSFHSALASLYNVILFTGFYPDLWKTSRILMFLKPDKPPSEASSYRPICLTSVFSKVLESILSRRIHEHLRLHQLLPLSQCGFRPSFSVDDQLLRLVHLLSVQVNSRRAAILVSLDIEKAYDRVWHSGLLFKLQTYALPINYVRLIASFLSKRPSYVTVNNQNSRLFYPSAGVPQGSVLSPLLYLLYSADMPRPQPPVHLLQYADDTAFLALAPSLARSQHLLQSHLSEFSSWCNQWLLTVNPTKSQAIIIGRTTPSFRHRDLYLTLHGRPIPQTKTLRYLGLTLDRDLSWNPHLKTVRQKALSRLNLLKCLSGRTWGLNPSTILYTYRSLMRPVLCCFHPAWISAPPSYYESLKILERHALRLAYRIRLPSPTRILYDLIPFPHLVQFLQHIRLKYIHRKIESHNPLVSPLLLDPGPLPRLYRHIPPSLHLHTLYVLSEGGFRHLPLPDDVLHNRPDIYPSFQL

SEQ ID NO: 2971 - protein, 561 aa, synthetic construct
  source 1..561: note = Description of Artificial Sequence: Synthetic polypeptide
MIGERKALKELNADNDIVVLPADKGNATIVLNKDDYESKILDLLTSGQYRKLKKDPTASVLKKTNTLIKSSTSIPKEDKKALLKSEAMCPRLYGLPKVHKINIPLRPIVSAINSPTYEIARYLATCLQPYIGKTDSYIKDSSHFIGKLEGLTLRPEDMLVSFDVVSLFTMIPVNEVMTFITDIFPEDLTTLFKHCLTSSQFQWGGDFYEQVDGVAMGNPLGPAIANFYMEKFEQSALGIAKKKPVLWYRYVDDTFVVWPHGKEALDEFFSHLNNINKKIQFTMEMEKDSAISFLDVLVMREVDGKLKHKVFRKATHTDRYLHKNSNHHPQQKRGVIKSLVDRAKKICTPEHLDAELKHLKQAFKKNGYSDKEINRVLRPNNNSLRTRDQTKRWKNTVSLPFIGKVTDQIGKILRKHNIRPVFRPTKKICQVLRSVKDKRPTLSACGVYKIPCTCGKVYIGTTKRSIETRLKEHKSLCRLGKTEKSAVAEHALQSGSHIVRFSETSVLSTMTNYYPRQYREAIEIYKHKENFNRKEEAMKLSDIWTVALKDRQVLSLTDCNR

SEQ ID NO: 2972 - protein, 965 aa, synthetic construct
  source 1..965: note = Description of Artificial Sequence: Synthetic polypeptide
  VARIANT 476: note = Any amino acid
  VARIANT 524: note = Ile or Leu
MPRKNWNCGRRTGDEKRKMMFGCWNVQGISTKIDLLPAELDMFNIDVVVLSETKRKGKGEEELDNYVHIWSGVSKAVRAKAGVSIMIQKKWKKRITNWTFINERIITVEMTLFAREVVIIGVYAPTNDTKDKEKDAFWDTLRETIEKIPRRKELIIMGDMNGRVGIRESCKIVGKHGEAEYNDNGERLIDICAQFDLKITNTFFKHKDIHKYTWQQNTKELRSIIDYIIIRQTSSFKAADVRSYRGAQCGSDHYLVKMKSFWPWKNATNDTSNINKMNCSEKVQNVHFNIDSLQDESIRTFFKARMERTLDESFEGSTEEIYEYIKTKVKNVASEVLGIKENNPKRAAEWWSEEIETSVKEKRNAFVQWLNDKSEGTRSKYKEKKNEVEKKIRLAKNEAWERTCANVNSKLGFGRAKEAWSVLKALRQDTKGKSNLQLVTQKEWEEYFKKLLNEDRDEYLEEGTVEENEHHDDEIXISESEVLQVLRTGKNGKSPGPGNINMEFLKYGGDKIVKLILQLFNKMXHGDSVPKEMKLGYISTIFKKGDRKICSNYRGICVTNTLMRIFGKIIKNKLEKNFRTQQEQCGFTAGRSCVDHIFTLRQILEKHREKSKNVGLIFIDLEKAYDTVPRKLLWRALHRANINTSLIKIIEQMYKDNICQVKIGNTLSQKFRTSKGLLQGCPMSPTLFKIYIDICLRTWSQKCNSMGLEIRDGVYLHHLLFADDQVVIAQDGEDANYMCNQLAIAYKNWGLKINYQKTEYLTNDPHELRIEGKKIKKVNTFCYLGSILETEGKSDSEINKRISSGRKVIGMLNSVLWSRNVMNRTKKIIYKSIFESAVLYGAETWTINQKHTKKLQALEMDFWRRSARISRKEKRRNTEVIKRMEIIERIDEVMDRKKLRWYGHVRRMEDTRIPKLVLEWQPEGRRRRGRPVTTWIKNVQLTMNRLGAEEEDTQDRHTWRNIVNN

SEQ ID NO: 2973 - protein, 558 aa, synthetic construct
  source 1..558: note = Description of Artificial Sequence: Synthetic polypeptide
  VARIANT 165: note = Any amino acid
RRHLVLINKQDYIQKVFEFFDKNGIIKIPCDPTNKYIAQTRKIIKSCSSILSDKDKRKYIPMNPKTPQLRGHPKTHKELSPIRPVVDSINCPTYLISKKLNTLLQKYYTYKKKYTIKNSRTLAANINKIDIPINGKFVSFDIINLFTNIPVKETINIIELNLLSXNKLPINSTYEIINLLHLVLEQNYFKFEDNFYTQPDGVAMGCNLASTIADIFLNTLEERFFLHQETNKIIYYYRYVDDIIVLIDGNETDINNIHGLINKLHPKIKFTMELETNKTINHLDLTIQNVQNKHRFEIYRKPTTTTNIIHAHSCHPSSHKLAFFHSMINRLINVPLDDAAKQKEMTILQYIAQQNEYDPNIILKLYNNKTSPRPPTTRTEITLQRETSKLNKPIYISTPYLGKISNKVQQIFRKTNTTFAFQNRHTLKHKFVTHTTKPSKFLNSGIYKISCNSCNKYYIGQTGRNFTIRYKEHTRESEKNPSTFYQHLQSENHTVDTIDNALEILHTVQKGYEMNILEEMEVCLHAIKNTNNLLNDQTDFKHKNYFDNFIHILVHDNG

SEQ ID NO: 2974 - protein, 990 aa, synthetic construct
  source 1..990: note = Description of Artificial Sequence: Synthetic polypeptide
MNRSRMDKKDLTFSMKSDTRIGMWNVQTMWQAGRLAEISREMKRYNIQGDEKILGLSETRWTGFGEIKTQEGDTLLYSGREEEHRGGVGLLITQKTKKSLIEWYPVSERIVVARFASRVRPITVVQCYAPTEAGSEEEKEQFYGQLHRTLLKAKKKDIMVVMGDLNAKVGNDNQGVESIMGKHGIGNRNDNGERLIEFCSNHRLVIGGTIFPHKNCHKVTWVSPDHRTENQIDHFTISKTWRTSLLDVRNRRGADVGSDHHLVIATLRLKIASTRNTQQKRRIKYNWDKLKNKEVQQCFSLELSNRFQQLREDEEQDIERNWKSIESTYIDTCEKVLGKRERGREEWITSETWEAVNQRKECKKRLNTARTQEEKVQARTEFNELNKMAKRRFRRDKRAFINNLAAQAEMAAQKNDSKTLYDITKRLTGKCFRSEKPVKAKDGKLLTSQKEQLERWREHFLEILNRQTVEEEVTEAATEEEQEDVDISIEPPSRIEIQRAIQQLKNGKAAGMDNITPEALKVDVSTSVEILFPLFKKIWEEEKIPTDWKKGLLIKLPKKGDLSECDNWRGITLLSVPSKVLSRVILERIKKRVNSRLRKVQAGFREGYSCTDQINTLRIILEQSTELQSSLYLLFVDFEKAFDSVMRKKMWKAMQEFGIPKKIIKITQEMYENYTCQVLHQGMLSEPIPVDTGVKQGCLLSPILFLMVLDLVMQKAMNRRRGIQWGLTGRLEDLDFADDLCLLASSYKDMEAMLNDLKTEASEVGLKINGKKTKEMRCNNRNEALFFFKPRDRASQAVLLPGKFSHPGGRTIEDIGNRINKAKGAFAMLRPIWKSRELNSYTKLRIFNTNVKSVLLYGCESWKTNKQLISRLQIFVNRSLRNILRIWWPQVISNEELWRRTHQTPIDIEIRRRKWKWIGHILRRGKDNVARQALEWNPQGSRRRGRPRNTWRRSVVAEGTEKGGKAWTEIKTLAQNRVRWRKFVDALCST

SEQ ID NO: 2975 - protein, 938 aa, synthetic construct
  source 1..938: note = Description of Artificial Sequence: Synthetic polypeptide
  VARIANT 115: note = Any amino acid
  VARIANT 503: note = Any amino acid
  VARIANT 508: note = Any amino acid
MRLSIQIIEKPAVDVIALQETHTADDQQIKSRGKIPGYKLIASNNHSKCGLAIYVKHTINSLKQPFKMWSSNLRQAYIKNYQVVSVSSENNIFTISAKIDSATIVNVYKPPRVNXPTPPLPSQQHPTLFLGDFNSHHNLWGYCENDSNGEALCEWMETENLKVIFDAKDPPTFHSGCWNRGYTPDLCFTTQLHSSHTQIRRSALRISLTVSTDLSFSRDWNMCTPCAVTPETKVEFQESRKSNVDKATDLLQSLDENRKKIWHETVESFDHTHSSRKAWSIIRKLDATNQTPVRPKTAIKLNDFAKHLISNSKSPKDKQTRREIKTQLNTKKRAAPNSSKFSNPFTEEEVRDAIRNMKVGKALDSMGSILNFSHTVDQQLSNGFLTSSQTFSPLEIFHHYSRKPSRGSKRCHQKHESWKGAGFDGIYPEFLTHCGPATIKWLSNFFSDILSTGNLPPLFKKTKLIAILKPNKDPTKVESYRPIALLSVTYKLLERLIYNRIHXTINKXIPIEQAGFRPGRSCNDQVFALTTHIESGYEKKFVSIAAFLDLSAAYDTVWREGLLLKFVSIIQCRKLTNLLSNMLSNRLFQIYSDNDRSKVFKLNDGLPQGSVLAPLLFNLYIYDLPATSSRKFIYADDICLVTQSPSFTTAESTLTADMEILDTYFRKWCLRLNLQKTVTSAFHLRNRHSNYKPEVKLRGQTLQYCSTPKYLGVTLDRSLTFRQHLSNVAAKVKTRNNIIQKLAGTSWGCSAQTLRSTALALSYSVAEYCCPTWMNSVHSRKIDVQLNQTMRLITGCIHSTQTAGYQFHPTSSSTRSDALLKIWRNIQKNPQLPIHSDTSTAEHQRLKSRKPSWKTAHHLDVTNFDINEAWKSHWEESSVSTVIWLKTLQCEFQVSHSPDASGESSTASEQDKGTADIYSTNGAGQHLPSVTVELPYKQ

SEQ ID NO: 2976 - protein, 1570 aa, synthetic construct
  source 1..1570: note = Description of Artificial Sequence: Synthetic polypeptide
  VARIANT 1230: note = Any amino acid
GQVWRSGIFFENASGAVLIQTASPAQSRALLACDKLGDVPVSITPHKSLNMVQGLIYHRDLLSQTDEELRANLERRGVHFVRRVYRGPKDQRVATGAFILAFEGDTLPEKVKVMIYRCDVKPYVPPPMRCFRCWKFGHMSSRCTSSPNCRECGRPSHPDAPCTPPPVCVNCGQHHPPCSPNCGVLHRERKIMEIKTLDRLTIQRHVKSMSGSIRAAPSGKDDNIFCRSHSGTSFTAINGQCSLLCGPYGPTTSTAPSMGGGTSSSVAPTTPPVGAITPSPSGTSVPAPSRRRNSLLRLLSLGRGPWDTPFRGFSQCTGDPSQRLKGPRPAGRRASRSSSNPDATTEKPSQASKPKGQREGRQKKSKKKETLVATKPQAPSSSASEDEVEILASPEDLAIPGSPESRIADTGDSEQLAADVMDEPVLLYGFSARRPVLLQWNCGGFFNRLAELQQLLCRFPVLCLALQETWFPAQRTPALRGYRGYYKNRAAYDRASGGVCIYVLATVPSAAVPLHTTLEAVAVRIRAMQEFTICSIYLPPDEAVSIADIAALIAQLPPPFLLLGDFNAHHPLWGGTQTTGRGRDVEALLSQRDVCLLNTGAPTHFCVARGTYSAIDLSVCSPSLLPHFRWKVHDDLCGSDHFPILVSLLHFQPAGHQPRWSLRRADWQRYASAAVVPVPLPADVDMAVHQVTSSIVSAAEATVPTTSGSPRRKSVPWWTPEIAEAIRDRRRALQRHRRHPTMENLIAFKRLRARARQLIRQSKRDCWEQYVANIGSRASSSQVWSQVRRLFGHRPPAAIPSINIQGTVCTDPTAIAEHMADHYACNSATAAYSAAFRALKVRVERRHLSFHTRRDETYNAPFSQWEFQTALAACPDTSPGPDRIHSQFLRHLSAESQHQLLALFNHLWAEGAFPSQWRESIVIPRNVQCAIQSVGIPNCPCCMPRYLPGTRPDPQPVPSPPFSRVPTPASRPVQPSMGRGGFPITMAGKHRYPVMKPGADPQVADSYRPISLTNVLCKLLERMVSRRLMWILEHRGLLSPRQGAFRQGRSTVDNLVALESAIRTAFSRREHLVAVFFDLRKAYDTTWRHHILATLHGWGLRGPLPLFIQNFLSLRSFRVRVGTSLSSPRIQENGVPQGSVLSVPLFLIAIDGLAAAVGSSVSSSLYADDFCLYFSSTGMGVAERRLQGAITKAQSWAMTHGFQFSASKTRVMHFCRRRAVHPDPELYLGXDLLRVEQTHRFLGMQFDARLTWVPHLQQLRKKCWRHLNVLRCLSHTAWGAARTSLLQLYKALIQSRLDYGSLVYDSAAPSALRVLDPITIVASVSWGSPPSESAGSSYWLLVARIHASPDHPNHRLLFPAAVLPSPRRRPRSGLPIAVRVRSLLSSLASLPIPPTFHYLSRTPPWFVPRLQLRLDLSSDSKASVSPMVLCRQFQALIDSFHGAEVVYTDGSLVDGRAGYAYVHGDHVEQHSLPCGTSVFTAELVAISRALTHFRDCPGESIVICSDSLSGLLALDQFMPKHHLVRSIQDAVFTLGESGRSVVFVWTPGHMAFRETNESITWPSRPPHHGP

SEQ ID NO: 2977 - protein, 1134 aa, synthetic construct
  source 1..1134: note = Description of Artificial Sequence: Synthetic polypeptide
MLIKLLQKDDHTTRQPIAIQSVSTKDTQKCQNNPKRRKLCQLSLKIRLHHGWKKNLHQYQPQQIPLKKTRPNRRNERRQGPTEETSSEVSDKIMTPFLKILKKKKRFKAVLFSVPSKHPVHKNKVQQLEVELQTLNSSLVCITEHWCKGHELTHVALKSYVLASHYSRTTLQCGGSCIYVKEGIVFKVRDDIIALSEDKHIEISAIEISKLNVLKRLTVLCIYHAPSGDMDTFIAKLNTSIGHGLMYSKDSLYYVFTMLPVVTWILLLQSLTQALDMVSKPKGRILICGDLNINTLNADGTCITFLNTLHSYNISPLINTATRITKNSASCIDHMLTDIEKDMCNVVVDHLGISDHSSQFLKVNINVETNTKLLKYIRVFSESKRSVFASQLASESWAEVYRESTVNGKFSKFLSIFKFKSEEVFPKVLRVIKAQNKNNWVTNGIRQSSKTLRHLSTIKNYNNTIQNFYNTYKKVYRKVLLAAKRYQNDKLIEKANNKIKAAWDVTNRVTNRKKAGQINIQFQLNGTSVNDPKKLANFANKYFSNVATKLQQKFVNNTQHPHTLNNVPHTMFLQPSTAEEVSKVVQNLKSKSSAGIDEIPVCLLKDCTQSISHPLAHIINESFTKGCFPETLKHAKVLPIHKKGDPESIESIENYRPISLLSSFSKVMETIMKNRLMAYLTKYNLLCKEQSGFRSGKSTSSAIAQFTNAVLEALDKGDHVTGIFLDLTKAFDTVDHTILLNKLEALGVRGVANMWFHSYLQNRVQQVEITKTNSNHTIKHLSEPEYINIGVPQGSVLGPILFLIYINDFPQSVKHGKSVLFADDSNILITDNSQIKLNQKAEDTLVHVSRWVENNKLTLNVKKTTASTSTQINPQCKKNNSINFHIKRKPVTNFLKIKDENIECVSTTKFLGMHIDSQLKWTEHITVLGKKIASACYALRIINSVCSSSCTRTAYFANIHSLISYGIIFWGTNEQNRQAIFKLQKRAVRIMTNSSSRAHCTELFKYMGILTVPCEYILQQSSTLEGPLYRIIQIYGNTNCSMRIHFTAVIYIKENINQYPPNSSIHEHETRSSRHLHLNRKNTTKTQNSILYNGIKLYNRLPQDIKNKDKIQDFRNSLKKFLEKCYYTVQDYLN

SEQ ID NO: 2978 - protein, 1834 aa, synthetic construct
  source 1..1834: note = Description of Artificial Sequence: Synthetic polypeptide
  VARIANT 328: note = Any amino acid
  VARIANT 342: note = Any amino acid
  VARIANT 382: note = Any amino acid
  VARIANT 771: note = Any amino acid
  VARIANT 848: note = Any amino acid
MGVPLGGTNTHSKKRARLGSPPDTGLCNMSMLKSNRAHSAVQNVFLVIKRKEGSFEKISPFYIQKGLEGIAGDLKSVKRLRNGTLLVETSSSQQAVNLRNAKCLGEYEIETEMHSTLNYSKGVVSCRDLVDIPNEELKEEWASEGIVDVQNITKRVDGGLVKSESFILTFNSPKLPEYVKAGFLRLKVRPYVPNPMRCFKCQRFGHTTLACKGEATCGKCGKAAHEGAECTPPAKCVNCSGEHPVWSRDCTVYLEEKKVQEIKTTKRISYGEAKKIFKAMQPPSFVTSFAAVVQKPVPKVDVSTQTDVASVGTNTCTCECTCKAAVVXEPELPHAHQKKLLXSTLQSFCHPPRQRPLARPWHLQSQRLFRRSSLTFPLLLSXTTATRTSEKATGVNITELLSPSPAEAIGQALAPSKPEAIPKVITDLSTPAVTNIKVAKPKKAPGKSQEQAKAGNKPSDYIEVIIPDLPSDSAPELMELDVPQGQTSRPKTEPPARSVSPTKRKERVKIQPPRWLPYCSGTAGFRTHVEELRLLTRDRPMCVCLQETCFKETDSPELRGYFLYRKDDLTGVRAKGGVAIFVNATYHSSPVSLTTGLQAVAVSVYLRHRLTICSLYLPPHDALDEDALRDLLTQLPQPFILCGDFNAHNVLWGSANTCPRGRAIERILLSSSAHLLNTGQSTHFCAATGSFSAIDLSLSSPALAHSAQWEVAMTYMAVTTSPSGFICQTQWYPPEPHHDGCFVRQTGPCSANWLNLNNVIASRNGWTILHXSLALFSSPCPLCSMGSGDDLHGSDHFPLWIHLPDTVVPARTPPRWVLRQADWTLFSQLAEFEQRDSVQEWVDHITQXIHRAAEASIPQSTGQLQRHPVPWWTEECRSAIRARRAALRKFKCRPTAENLAAFRLARAKCRKVIRESKKRSWQHFLNSVNRSTPSTKVWETIRRISGRGGRCPVAAVMANGTLHTDPRDIAQTMAEYFATVTSTAQQDPAFQRHRMGAEKGSLDFRSTTAEEYNCPFSMWELDSACLQLVIRALDMTGYITVCYSTLQNGTEKSSSHFLMSFGRQVIFPTHGVKQFEGQFGLQVHYCRRIQLPFLHVGARFCLSAARDTCPGHDRIHYSMLQHLTERNREILLSLFNVVWASGHFPDSWREAVLVPILKPGKDRTSPSSYRSIALTSCVGKTLERMVNRRLVWMLESRQLLSRFQCGFRKYRSTFDNLAFLEAAIQQAFLRRQHLLGIFFDIERAYDTTWRHLILRQLHEWGFRGAFPFLLCPFFLHAILGIESVTCSRIVLSKRTVFLRVAFMGFSWSLPLFIVSFLSPRYFRYRVGDVLSDRFEQENGVPQGSVLSVTLFAIAINSLTSVVKSPVQCSLFVDDFSIFCSSSSLATTTRQLQLTLRRLDDWAKKSGFKFSTEKSVCVLFNRSRSILNLPELRMRDTVLHFKETVRFLGLIFDSKLTWLPHLKDLKKRCLKALSILKCLSHNSWGADRTCLLRFYRAFVRSRLDYGCTVYGSARPSYLKMLDVVHHEGIRLATGAFRTSPIPSLCAEAAEPPLSIRQLLLGRQGYKMLSTPHAPAYHSVARPPMAGCFILGRGQHDPLGFARIVSHRWVYLILMFTSGLEQISSLAPSEAQHYFRLGSFKKGCTPDFTYRLNFSKFIGITILRWSTPMVQAGDSLGCSIVFPTMLPGFASHSLFCLHSRASRDLSIRNAACSEHTVSYLLRFTRTAITDSLYPDEKIHSSYRTNCTPSSGGVSRCHSAGSWHVGIRGNEVADGLQRRPAATTTYTICHSPAGCPLCGSAEVLSAVGRHVAAVTGNKLRSVKPTVRRGNLLPVTDA

SEQ ID NO: 2979 - protein, 975 aa, synthetic construct
  source 1..975: note = Description of Artificial Sequence: Synthetic polypeptide
  VARIANT 445: note = Any amino acid
  VARIANT 478: note = Any amino acid
  VARIANT 479: note = Any amino acid
MLTIISVNIEGLSSSKENLLHEMCQSNKCDVLCLQETHRDNNHRRPNIPGMKLVAERPHAQYGSAVFTKPDLQVKSTCHTEENNIETITVELKDYTVTSVYKPPSEIFAFTPPANFVKEKISFVIGDFNSHSHVWGYASEDKSGEAVLAWAESSQLSLIHDNKLPPSFYSRRWHRGYNPDLLFVSENIAIQSCKSVCPPIPNTQHRPIMCQLFPAIRPQNVPFRRRYNFKKANWDRFSGLLDEKIQTINPAPEEYDLFVDTIRTCSKASIPRGYRSNYVKGLDSEAATNLDRYYTLFERDPFGEETLAQANLVTSSISEAKKKEWVKQMEELDMGRSSNKAWRLLKRLATDQLNLKHANVKSNQIAHQLLKNGKPVRRNRNVQNSRQIERDISQETSEISKPFSMTELDKAISKSRNGKAAGLDDICVEQIKNFGPAAKKWLLAXMNNCMSACKIPKIWRKTRVIAIPSETWEEPDDXXSYRPISLLCHLYKTLERMILNRLTEVVEPLLIPEQAGFRTSKSCTAQILKLVQHIEDGFEERKITGAVFIDLTAAYDTVNHRLLLQKFYTSCKDYGMTQMIGNLLQNRRFFVDFQGQRSRWRTQKNGLPQGSVLAPLLFNIYTNDQPLPEGTQSFIYADDRAITAQGNTFETVESKLSEALEQLAIYYKENQLTPNPRKTQTCAFHLRNRQATKKLNVSWDGIPLVHCATPKYLGVTLDRTLTYRDHCMNTKQKVAARNNIVRKLAGTTWGAEPSTLRTTTLALCYSAAEYACPVWYNSSHAKQVDIPLNESCRIITGCLKPTPTDKLHCLAGIAPPSIRRKVAASKEKLKSVTSAAHPLFGQQPARRRLISRRSFLHTTECLTDTPQNTRTEMWRNKNVHLHDWLVPTEELPPGHGEKRNVWRSLNRLRSGVARTKSNMHRWGLSDESVLCDCGQEQTTSHLMQCELCPSTCTVEELMKATPNALDVASFWSKIS

SEQ ID NO: 2980 - protein, 919 aa, synthetic construct
  source 1..919: note = Description of Artificial Sequence: Synthetic polypeptide
  VARIANT 389: note = Any amino acid
MRLVNEIAHEKHGSAIFVRQGLQVSGSRTIQHNNIELIGVELDNTEIISIYKPPAQTFNLNIPLLSHTRDNMHTVVLGDFNCHSTQWGYSETNEDGHLLEQWAENNQMCLIHDPKQPPSFNSGRWRKGYNPDLIFVSKDLSALSYKQVLNAIPRSQHRPIKLEIRPVVQPVEIPFRRRFNFKRAKWEDFGNKLDESLKLIEPKPEHYDKFVQAIKDASFKTIPRGCRTEYIPGFTDKNKDAYERYCDLYDKSPLAEETIECGEELLEALSDQRRQTWMKTVVGMDMTHSSRKAWRLIKKLSNDPTIRTPHVNITPNQIASQLLLNGKVNGKNNAARSSLKVKKSKESNVSDVDFSVEELEEAISSLKVGKAAGLDDIRNEIIKNLSENXKKWLLKFFNCIWRTAKIPRIWRHAKVIAVLKPGKDPNDPKSYRPISLLCSLLKLFERLIMNRIGDYIDSCLIDEQAGFRPGKSCTAQALNLTQFIEDGFERGLPTGVVFIDLTAAYDTVNLRTLISKVHRMTNSDRLAEVLRALLFNRRFFVDFQQKRSRWRNQKNGLPQGSVLSPLLFNIYTNDQPIGKKTKSFIYADDRAIACQAKTSNEIEAILTEDLTTLTEYYRRNHLKPNPSKTQVCLFHLNNREAGKVLDIIWNDVRLNNCSHPTYLGITLDRTLTYKKHIEKTKAKVQTRNGILNKLTSAKWGANAKVLRSTALATCFSVAEYGCPVWERSHHTKKLDVVLNNTCRKITGCLKPTRVDYLYSLSGIAPPNIRRSFLSSIERNKQTNDHRHLLYKNQPVPKRLQSRRSFMYSVEPTVASIKSLWQEQYPEALITEEALPQGSHLDWQHWKTLNRLRVGVGRSKQLMKRWGYTDSDECECGAIQTMEHLLKCPLVDASRECTQEDLLKYTGTAAAYTDFWTSKI

SEQ ID NO: 2981 - protein, 1191 aa, synthetic construct
  source 1..1191: note = Description of Artificial Sequence: Synthetic polypeptide
MEPLREMAAKEGKKANVHSVCIPGGVIPDVERVLPDAMKGTGCSQLQVVAHVGTNDVCRFGSEEILSGFERLSEVVKTASLACKMKAELTICSIVDRTDCGPLVQSRVEGLNQRLRRFCDRVGCRFLDLRHRVVGFQVPLNRSGVHYTQEAATRVAGAVWRGLGGFFFFRELCGVDWAVFFFFRLEGLGNTQKGFQSQRVQVKDRTNTDLKTIGLTVVNCRSCVGKVPELQALIESTESQIIIGTESWLKPEISSAEIFTKGQMVFRKDRLNKIGGGVFIAVTGGLSCSEIEVDCSCELVWVEVIPDNQNKLIIGSFYRPPDSDDSIAEMFKESLDQISKTYPKHTILIGGDFNLPSICWQKYMFKTGGKHKTSSEIVLNAFSENYLEQLVHEPTRIVNGCENILDLLATNNPELIKSIKTDTGISEHRVVVARLNIGLSKSTKIKRKYIYSKKQIKIRLTLSKKIYLFKKADKNSINAFLSENLQSFETNNVSVDQMWLTFKEIISTTIDRFIPNKLTKRGLTRRGTQNRLDHCYKSKEKSMPNLNAQKIPKTGNLLQKLEIQIHTKQINKEGADPPWYTKQVRSLLQKQRKKHAKFKRTKNPQDWQSFTETRNLARTSMREAYNSYHNETLSRNLVENPKKFWSYVKYTSGKTQSIPSLHDRNGDATDDSSAKAELLNTAFRNSFTREDEANTPEFVSRTAASMRNLEVDTPGVLKQLKSLNKSKSPSPDCIPIRFLSEYADAIAPYLTIIYNRSLSERSVPKDWKVAQVTPIFKKGNRSDPQNYRPISLTSVCSRILEHILSSNIMNYLEENDLLSHSQHGFRKYRSCETQLALYSHDVMSAIDKGCQIDSVFLDFRKAFDTVPHKRLLIKLRAYGISPQLCDWIRDFLSERTQYVVIDGKSSSRTEVISGVPQGSVIGPLLFLIFINDLGDNLSSSLRLFADDAVIYRLVKSPEDQKQLQNDLDKISAWCKNWQLTLNNDKCEVIHMTTKRNPLNFSYTINQSNLQAVNSTKYLGVTITNNLNWKEHIENIVGKANQRLRFIGRTLRRCNSSTKETAYTTLVRPILEYCCALWDPHQVGLTDDLEKIQRRAARFVLSRYRGESVTEMMHELGWKSLKERRYLLRRDLFAKFLSPTFSSECEHILLAPTYIGRHDHHNKIREIRSKTERFRCSFFPRAIREWNYREIS

SEQ ID NO: 2982 - protein, 478 aa, synthetic construct
  source 1..478: note = Description of Artificial Sequence: Synthetic polypeptide
NKCSDSTNCESDKQPSNLIEKKLNKIICENYTYSRQYTVKSSTDLIAKIQDIKIPDNSRFLSLDVTNLYTNVPIDETIAIIKENLLKYRKIPKQSLNNSTITIILSHNYFSFNGHVYTQNDGLAMGSCLSGTLANIFLDHLENKFFEEQNQWKTKVVYYFRYIDDTIILFNGCIEEIEDFHQRFNNMHKKITFTIEHEINNSINFLDLTISKTNSVHTFNIFRKPTTTDIIIHNSSCHPQSHKEAYFRSAIDRITKYPLCNKNINSELNTLKDIAISNGYNPELVNNLYKSKLNSKQKSIKDEITLTKTETRKKDKFVILPYWGQISDRIKYALKKTNLKIGFYTNNTLGTNIIHKIEKIDRYSQSGVYKIECSKCDKAYIGQTGRPFKIRFREHINTSENNVSAFGTHLRESKHSTGSIEENLKILHIVCKGQLMDVLEELQIYTHMTKYPEQMLNEQTEMRNKKFIENFHNTLASI

SEQ ID NO: 2983 - protein, 751 aa, synthetic construct
  source 1..751: note = Description of Artificial Sequence: Synthetic polypeptide
GKQNCKLLSVHITISNGVCSSDWDRIDRLLHDTINKRVLTTSSRQRKKFDSLRPQPTISQLDSSRTVINLSGHLLSDDERSVLARGGNFAVSPRVVPTEEIIANIEAGIRNLDKVTAEEIRIEAVRVLARAKPPKSNLTTGEKNAIKSLNEDDSIIILPADKGNCTVVLNVTDYHCKIKELLDPQTYRKLSKDPTDKVLRTVTQLIKKSSIEQCVQKSLFNSVALPPRLYGLPKVHKEKENVPPLRPIVSAIASPTYLIAKFLTTLLRPHVGRSDSYIKNSRHFISKLNDILVNPEDILVSFDVVSLFTMVPVNEVLQQLNLLFPPDIADLFKYCLTTTYFKWNDDFYEQTDGVAMGSPLSPVIANFYMEKFEEQALKTANKKPAIWFRYVDDTFVVWRHGREELDRFLQHLNGINSRIQFTMEKEADGKLNFLDVSVFKKGNGRLGHTVYRKPTHTDRYLHRDSNHHPQQKRGIIKTLADRARNICEPELLDAELKHLSNALLKNGYSSTEIRRALRPTRRVENDERVPVKSKVFLPFIKDVTDRIGKILTKRNVAVIYKPTRKIQDHLKSAKDARKPLEKAGIYRIPCSCGDVYVGTTKRTVKKRLDEHKGNCRRGEIDRSAVAEHVFQPGDHLIQFDKTQVLAATNGYHERLYREAIEIVKHPNNFNRMEEGVKLNEIWIPVLKKKCNSLPPWDDINGRRQSATTNCARMSKTSDVTPLRASPRKRSLASVSSEPGCASDIQKCHDPP

SEQ ID NO: 2984 - protein, 1007 aa, synthetic construct
  source 1..1007: note = Description of Artificial Sequence: Synthetic polypeptide
  VARIANT 65: note = Any amino acid
  VARIANT 911: note = Any amino acid
  VARIANT 991: note = Ile or Leu
MSATTTIPNGSCQGQQNCQQNDLNRAIGPVLNVCHLNIEGISRSKCDFLSKNLLSNNTDVLALQXTHAEDLKNCARGNIHGYRLVGEIGHRTYGVATYARQDLDDVSIIHESCDDDIFVLAVKVSGTTIVNVYKPPNIQWQDTVLPVFEHPSLYVGDFNSHSSHWGYSSDNENGIALAEWAENNNLSLVFDAKDSSTFFSARWKRGYSPDLCFCSCDQTLRSLSVTRKVLGTFPRSQHRPVLISVGIKIPLIRSFPRPRWNFNKADWEAFTSKLEDNIRFIPPTTENYDRFAGLLKATAKACIPRGYRKTYIPGWSQECEDLYNEFISTEDSNTADLLLNSLDNARREKWVKKVQSLDFTHSSRKAWSLLRKLSTSVSEKKLPPTHPDPSDIAKRIVALSKSKRQQSDRLISYKLNEVKKCQQAPLEVSKPFCLDELHVAISDVKTGKAAGIDDIFPEFIKHAGLKTRLWLLNLFNNILKDSSLPKAFKRSKVIAVLKPGKPADRADSYRPIALLSVCYKLLERLIYNRIVPILTASIPVEQAGFKQGRNCCDQVLALTSFIETGFEKKCTTSVAFLDLSAAYDTVWKKGLLVKLYNLIPCPILLRLLNSMLSGRLIKIYLGNTESGFRQLHDGLPQGSVLAPILFNVYTADIPATQSRKFIYADDIAIASQHRDIHVTETTLTSDLTLLRNYFAMWKLKPNPNKTEVACFHLNNRMADYKLNISFDGVQLEHSEHPKYLGVILDRSLTFKYHLHKTADKVKTRNNILQHLAGSSWGASAKVLRTTALSLVYSAAEYCSPVWLNSAHVRDIDVQLNRAMRLISGTLMATPLQWLPILCNIVPPDLRRKEALMREYYKILSTPELPILQDLPPQVSRLKSRKPPLKTAVQLHESGFSPKSNWARTWDSFNGXNSIWIDDPSKELQGMDLPRREWSLTNRFRTGVGRCNYWKFKWGQADDQSCDCGADIQTMTHILTNCPLRSFSGGMTELHXVSQEAVQWLKELDLAL

SEQ ID NO: 2985 - protein, 1030 aa, synthetic construct
  source 1..1030: note = Description of Artificial Sequence: Synthetic polypeptide
  VARIANT 176: note = Any amino acid
  VARIANT 857: note = Any amino acid
KEQKISKGAQWCPSAINRPIQDQDRSSGTRSKKSNATPHPARPQQKGERKTSKPQILEPSADLVVFHQNVQSLTNKIDEFQIMLENELKKVSVLCLTEHWLQDDTLNMVHFPNFILGSHFCRKKRYASPQHRKQSFVVADLHKSIHLHPSFPEAFQRKIPWKYQDLSYCMKTYLNXECVLHKLSKKNRHIIICGDFNIDFSVGLETKPKTDILNLLLTFNMTPTIQTPTCVTKTSATTIDQIFASVPMEYKARTLCTGFGDHTAQEITIKMDLPLHCKTSLLTITRSFNLQNTNTFTQYLTNESWEEVYSCRDTNEKFEKFLSIFQHYFELCFPLKKRKIKKSNIKSSWITPGILTSLREKRVLHTISKQTKTTPEFDTYFKRYKQILNKVIKKSKKLTNFSYIEKPQIKCNVDYCERNRQNTGHTHSNINLLENGEEITDPHRVADLFNVYFTEIASNLIDKQQKPASENKNQQKLFIRKNNFPIPNRRKGSTEYYKRIKTKIFIRHKCATVVTKPLTHLCNSSLSNGVFPEKLKLAKVKPLFKKGDKRNEKNYRPISLLPGFSKILEKVFYRRLISFIEENNFLSNTQHGFRKQKSTETAIFDFVNEALSTIDQKEHVSALFLDLTKAFDMIDHNLLLKKLEYVGIRGLAHKWVTSYLKNRAQIVEIAHQEGSNIYTYQSERKDIKYGVPQGSILGPVLFLIFINDLETSSSSQKYIKFADDTNILIKGKTAAELQHEIQNCTSHIEEWFTTNNLVINIEKTVTMHLHTIQNKHPLTPTIKLFNKKLETVNSTKFLGISIQDDMKWDTHIKYISKKLNTICYGVRILARCTTKETLKNVYYAQAESLLRYGLIFXGNSPESRYCFVAQKRIIRSIENATPRKSCKPLFKALQILPLPCLYILEIVTYIKKISVAQNNLVYTNKSVHTHDTRQTLDLHSEHLRTTLRQNGPLQMGEKIVQQTSSPYQNNQRTPEVQIGCKKLFTRKIIYKINVITLSVNICQLNLMSCFLTYNYCNYCHLLYDVDCIII

SEQ ID NO: 2986 - protein, 1726 aa, synthetic construct
  source 1..1726: note = Description of Artificial Sequence: Synthetic polypeptide
MGDNFAMTSSSSSSTLPFTQKRKLDESKSKKVLPNLPKFLVVSRTDGHDFSSVNPFVIQRGVDAIAGPVKTCSRQRNGTLLLETEGAFQVQKLLRTTLLHTFPVKVEPHRTLNSSRGVVFSRSLDGLSDEELQEYLSDQGVTAVHRVMKRVNNNLTPTQTNCVLDLHRPKQTVFLTFDKVDLPSKIKAGYEIISVRPYVPNPTRCYQCQRFNHTRQSCPNAAKCVTCGRDAHEGDCPPPSPRCINCMGDHAANSRECPVYKDERAIQEIRVKEKVSTSAARKLLASRKPAVLPAGTYSNVLSSPRPTKETGTQTCDFTFSDTVVRSASPKIARSTSPMPSAHSKSQSTSVSQKSRATKSEARTSKKDPVREDFLKTSSSQPSAAHSSNRTASKKAHKKRSSSPSPPRRDSSVTPSSSRRPRPSSVSPGRSTACRSAGISPAEEAAPSDQSRKEAEQMSEPMEHDCPSVDCSSSAASQPGPQRPSRSPLAFSLFFFSAFFMALLQWNIRGIRSNRDELRLLLRLHCPLIVGLQETKLRPTDHINFPQYTAVRFDLPPVEGIPAHGGAMLLIREDVYYHPIPLQTPLQAVAVRVTISTFTFSLCNIYTPSSSAVLRADLLHLVAQLPTPFLLIGDFNAHHPLWGSPASCQRGSLLADLFNHLNLVCLNTGEPTFLSDTTHTYSHLDLAICTTPLAHRFEWYVLSDRYSSDHFPCIISLLHHTTSPCSTSWNISKADWGLYSSMAVFHDQNFPSCDSQVNYLTDVILTAAEHSIPRTSTSPHRVPVPWWNAACSDAIRARRRALRLFQRRPTLENCINYKRLRAKCRRVIKESKKACWTAFTSSFNRSTPSSVVWGNLRRLSGTKVHSPIPGLNIANQVLVEPVDICNALGRSFAEVSSSANYDPAFLPRKQAEEARTPSFTSPNRESYNATFTMQELERALALSRSSAPGPDAIHIQMLKNLSPAGKCFLLRTYNRVWTEGEVPTRWREAIVVPIPKPGKDKHLPSSYRPISLTSCVCKVMERMVNARLVWILESRHLLTNVQCGFRRHRSSIDHLVTLSTFVMNNFLRKRQTVAVFFDLEKAYDTCWRAGILRTMHTWGLRGRLPLFICAFLKDRMFRVRVGSVLSDTFRQENGVPQGSVLSVALFAIAINPIMDCLPADVSGSLFVDDFTIYCSAQRTCLLERRLQHCLDSLYSWSVANGFRFSHEKTVCINFWRYREFLPPSLHLGPVALPFVETTTFLGLTLDRKLSWSPHVSSLAARCTRSLNVLRVLSGTSWGADRTVLLHLYWSTVRSKLDYGSFVYSSARPSILRRLNSIHHRGLRLAIGAFYTSPVDSLYAEAAELPLTYRRDILLCRYACRLLSMPHHPSYPSFFNDSLDSHYGLSAIALLPPGVRFRRLLRQLDFTLPSTFQIGESPVPPWLQAQVRVHLELTSLPKESTSDAVYRSRFLELRAWLENSVFIYTDGSKTNEGVGCAFVIGDDGFQYRLNDHCSNFTAELFALYQAVLYIRRHRSPSYVICSDSLSAIQSLRDPFSAHPVVHRINRSLQLLAADGPRVHLLWVPGHAGVPGNEAADAAAKAATLLPRTATYCVPSNDIRGALSRRLISSWHNVWSSLTNNKLRTIKPLPVAWRTTSRRSRREEVILARLRIGHCRFSHRHLLTGDPAPLCSCGHPLTVRHVLLSCPNFTPVRIALNLPDTLEEILADDARAAARVLNFINLTNLSKDI

SEQ ID NO: 2987 - protein, 1052 aa, synthetic construct
  source 1..1052: note = Description of Artificial Sequence: Synthetic polypeptide
KTTYIVTTAEHRRAKDQEDLLCVRIFYGFSTRRKAVTNQPGDSSNTQVGAKSSVTVQESQCSFRIIHQNFGSLGNKHNDLDVLAFVNKPDVLVITEHWYPKDKISVMHPLMMNLCSSYSRMNKSGGGVAIFAKSGSNFIVSFYCVIDVSSLSVEGVIELSAINYRWERQHIIIVGVYRPPSANIDIFLTNLNQLLVEIDNKYSGKNGCINIIITGDINIDTLSNNSTTKRLQLLLQEFNLNLLIKEPTREVGGTRTCLDNIITNMDKFTYKTAVLKLAISDHHAVEFQCVPNINLHLVKHKPPPGKMKRYETKRTINDKNIRNLTHVLQSATWAETNCYSYENFASDFFYYFDMTCPTKSVIVNNNEKCRKVPGRKMQKSTWIDAEVTQARNMLTLFQCKMLENRENTKLKEAFNKYHEYYKNLIGDKRSKHVAHILNNGNNTAACIWNVINSFRAGKDNVINDLVISYNGSVIECQQDIANIFNEYFSSVGKSINDRLHNNKYAFKGKASSYSIYFTPTNSNEIRNIVKTLRNSKSAGYDGLNINIVKSCIDSISGPLSTAINNILTSGSFPDSLKIAQVTPIFKKGDRLKIENYRPISILPVLSKIIEKVIYNRIVTFLNKHNIIFENQNGFIKNKSTVTAAAQYIQLLHSIFDEVITAIENKEYVTGIFLDLEKAFDCVNIPILLDKLWNIGVRGIAHDLIKSYLTNRKQFVVIRTSSGTYRSTVTDMKYGVPQGSVMGPLLFLIYVNDIKYCTQNSKVILYADDTSIVCKHKELDQLEILSNCLTNEIVQYFNESHLSVSTAKTAVMDFNPSRQTDFEIQLCIGKDIASKENCVKFLGITIQDTLKWDVHVDTLASKLAKNIFAINMLSKHCNDTQVLRTAYHALMSSNISYGIEVWGATTQANLNKILKLQKKAVRIICGAKPKDSCRSLFPKAGILTVVNMYIYKSIMLIRKLNLNLNSDTHNYNTRNKDKFHLLSHRTALYERNPLYAGQRLANTIPSCITSLPTEKFKVTLKRILITNPHYSLDEYFCFAQNKENFIPDSLTSV

SEQ ID NO: 2988 - protein, 1085 aa, synthetic construct
  source 1..1085: note = Description of Artificial Sequence: Synthetic polypeptide
  VARIANT 615: note = Any amino acid
  VARIANT 649: note = Ile or Leu
  VARIANT 698: note = Any amino acid
  VARIANT 717: note = Any amino acid
  VARIANT 731: note = Any amino acid
  VARIANT 760: note = Any amino acid
  VARIANT 780: note = Any amino acid
MPPLRQMQRLTRDQNQQMRNPRNHTARRQRNGGENSTTQPLTRSERTQEQRDRTHQAREEDVATAALSSSSTVPATPRENAPRFEDMVTLLQKLRDLIKEIPRQITAAVTAAIQAISTGPVMARSQQGLTIAAWNANGIRTQEGEFRQFLREEAVDVCLVNETFLKPGVHVRAANYVCYRTDRTTHGGGTAVYVRASLAHHRVQLPPLQAIQESHSGSGRHIHRQDHIRRSLQTTKDCGTTCRRRNFTVTPGKVFAAGDFNAKHHIWNSRVINNHGWHILREAQHNDAMAIGPNDPTHFPENGGQPDVIMLRSDPFPREWGTAGCYYVALIKGVPYVISASTRNVLSSDHVPVVLDVDVDAGPAKRRGLPTNSTNWDRYREHLGNSLQDAPMVEDAGVEDNVRTFTKNAIQAVKRATPRLQRDPPDRSRQLPPDILAMITAKNRMFREWQLTRNPATKRAVNRMQREIKAAVKAHRHQEWSNKLATLRVDDGTGWKATQMFLRRRLKIPPLQVGPTIVSAPEDKANAIADVFEANFTPVQDPIDPEHVRLVQERLPTFLNAQKSVQKRCPGFYAASINEKLEAPTSSLTKCFDRCRQKPQRTLQQRHCIMRTGHXPQAWKHAEVVPVPKPGKDHRLPSNYRPISLLPAXSKVFERVYLKRLMDHIRRENILPDEQCGFRPGHATTHQLLRLVEEALDXTERREYFGAVFLDVSRAFXSVWHDGLLFKLLDXRPAPAARPINSVVSPRQDVPGAHWKRPSXRPNVGNTSGQYSLTFRERSXPSGMTVYSSSCWTSGLPLPHVRLIRSYLQDRTFQVRTEELSTRRPIRAGVPQGSVLGPILYILYTADMPRIDRVHLALYADDTALFSRSMNARTLGTRLQRASDELSRWATKWRLSFNGAKTQALIIARKRVPVDLPRLSVRGTAVPWGRTAKYLGVTLDRRLTWQQHVDDVIGRARGRLRDLYPFLNPTSTLPPQLGVAIYTTLIRPIFEYAAVVWGNAAQTHIKRLQGLQNRILRLALHLPRDFPTEDLLRVTEIPPIQARFRQAAKLFYQKAARSPNALIRALGHRVQRLNATRWPHLLRSD

SEQ ID NO: 2989 - protein, 1025 aa, synthetic construct
  source 1..1025: note = Description of Artificial Sequence: Synthetic polypeptide
  VARIANT 5: note = Any amino acid
  VARIANT 941: note = Any amino acid
GLHQXNVDILALQETHIEEPLNNARGNIPGYRLVAAIGHRAYGVSTYVRQGLDDVTVKHNSSNDDTFILAVKVSEITIVNVYKPPNTQWTDTVLPVFEHPALYVGDFNSHHSQWGYPADDENGRRLTSWAENNNFSLIFDAKDNSTFYSARWRRGYSPDLCFCSCERSSKPMTARRRVLGAFPHSQHRPVIISVGTQIPIIRSFPRPRWNFSKADWETFTSKVEQSIRFIPPIITTTVSRIFSWLLLNSVSPGASGKNTCQDGVENATIFTRSFKTPKALTQPTICCSLLTLPGKRSGQSRLGDLYFKGRAEHQVYPSHNNYDRFANLLLAIAKQCIPRGFRKEYVPGWSRECDDLYKEFQDTESPDTADHLLQSLDTARKEKWIKTVENLNFTHSSQRAWSLLKKLSSGKPADNCTVTHPNPCDIAKRIVSSSKSARLPSDKRVAYKLNKILRSQFTPLEVSRPFTEEELEAAITTLQTGKAAGLDKIFPEFLKHIGPKTKFWLLTVYNAILATGNLPKAFKRSKIVAILKPGKSPEQAESYRPIALLSVCYKLLERLIYNRISQILDASIPVEQAGFRPGRNCCDQVLSLTSFIEKGYEMKKKTSAAFIDLSGAYDTVWRKGLLLKFYNIIPCPLLLRFLNSTLSNRLIKVYLGHKESAFRQLNDGLPQGSVLAPLLFNVYIADIPATQSKKFIYADDIALATQHTDLPTTEATLTNDLATLQEYFRTWKLKPNPNKTEVSCFHLNNKLANQKLNIYLDGVKLTHNNHPKYLGVILDRSLTFKSHLQKTAAKVKTRTNILQQIAGSSWGANAQVLRTTALSLVYSSAEYCAPVWLNSAHVREVDVQLNRAMRIISGTLLATPLPWLPVLCHIPPPEIRRQEALIREYKKILSTPQLPITQYLPQNLSRLKSRKPPLRLASQLIAEDFSPNTTWAASWDXFEGRNKHLIPSPSTKVGGMNLPRREWTLLNRFRTGVGRCNYWKCKWGMTLDQSCDCGADTQTMDHIAIDCPCVLSLRGWLVFTI

SEQ ID NO: 2990 - protein, 841 aa, synthetic construct
  source 1..841: note = Description of Artificial Sequence: Synthetic polypeptide
MTTPAVKAFIYDQTPLRRGYVNIGSAVREHAKKSQQLCSLTFLLRCRDTSTVPKFLKVKRTFRSAQAHRIYSRMESAMLRERIHQTRRALAETNSKLFQLHLLISNTMQCDDWNKIDNLTFRTMEASAEIAGNRQKRKFDSLQKNVLVGTMEDNSRTVINLSDKVLTADEVLVLAKGGNFAVTPRKVPTEDIVANIEAGIRQLSQQSADVIRMETARILRTCKPPTSNLSQAQRKALRDINADENIIVLSADKGNATVVMKSEDYHEKIMDILDPSNYKQLRKDPTSKILKMTNQLVKASSFSSDDKKHLCKTEAYSPRLYGLPKVHKQLVPLRPIVSAIGSPTHEVAGHLASLLQPYVGGTDSHIKNSCHFIDIIKELSVDPDDILVSFDVVSLFTMIPVNEAITCIADIFPSDIVALFKHCLTTTYFQYKNVFYEQIDGVAMGSPLSPAVANLFMENFEQRALQTARKRPAKWYRYVDDTFVIWTHGEEELDAFLLHLNSINPRIQFTMEKETNGQLNFLDVTVIKREDGSLGHKVYRKDTHTDRYLQKDSNHHPRQKKRRDRLSNERTDHWVIRSIGKTHTLIVIFKKILTTTHDKKRGVIKTLVDRAHKICEPAHLDDEIEHLRVTFKKNGYSDREIDRALRPRRTTRTDEERQQPKGKVFLPFINKVTDRIGKILSKYDVETVFRPTTKIKEFLRSAKDKRHPLATPGVYKIPCSCGKVYIGTTKRSVNTRLGEHKRNCRLGHTDKSAVAEHVYQEGDHEIKFNETSVIAKTSHYYARLYREAIEIFKHRNNFNKKEEGLKLDKIWMSTLQQQHDNRLISIEEVGNSRDHSTADTT

SEQ ID NO: 2991 - protein, 850 aa, synthetic construct
  source 1..850: note = Description of Artificial Sequence: Synthetic polypeptide
MLVILSHSHVWGYQEEDRNGAILNEWMDMYNLQLVHNAKDPGTFRSGRWQKDYSPDLCIISKSGNNNTTQRKVIKSFPHSQHRPVIIQFGTEIPLVKSVPLPRWNFQLANWEQFRKSLDNSIQWIPPLPSNYERFLGAIKVNAKRYIPRGFRKEYIPGWSEECDELYAEYQDSHSDSTADDLLRALNKNRREKWHKTTAGLNFTHSSRKAWSLMRKLGTDPRLSNRVAHVNANSVAARLMNISKSKVEKAYTRTVKKELHIKRSQLEPHSDYSREFSIEEVETALKMVKVNKAPGFDGVYPEFLKAAGPKTKLWLTDFFNAILRTGKLPKLFKQAKIIAILKPGKDGTDASHYRPVSLLSMTYKLLERLILNRIQETIDQIIPAEQGGFRKHRSCCDQVLTLTTLVETGFQRGLKSAAVFVDLTAAYGTVWREGLMLKLIQIIPCQKLAFLVNNMLSDRRFKVFLNGQSSRWRTLNNGLPQGSVLAPILFNLYIHDMPDTNSTKIQYADDLALVFQSNDLKHCEQVLTSDLIKLSDYFHKWRLQPNPNKTEVTAFHLNNKEAQRKLHVTFDGIEVPHNYNPVYLGITLDRSLTFKEQCLKLSKKLASRVNLLRKIAGSNWGADANTLRSAALALVYSAGEYCAPVWENSAHTTKIDVQLNEAMRIITGTVRSTPIQWLPVLANIAPQDLRRKAAKVKLIKNVKAHKNSPLYDALQDPPACRLKSRKPPWCDTESTTSFDVTSKWQERWNENPPHNGHLVQDPSKKVEGFHLPRQTWSRLNRIRTGQGRCAYNMKKWGFLPSSDCDCGAEEQTVGHIVKQCPLRAFNGDLESLHQVTESALDWLSNLDISI

SEQ ID NO: 2992 - protein, 886 aa, synthetic construct
  source 1..886: note = Description of Artificial Sequence: Synthetic polypeptide
MFYSCDDNRHEFGTGFLVHKYLKHLVMNFTPINPRLSVIRIKGRFFNYSIINGHAPTEESIEDLKDDFYDALEKAYDKCPRNDIKIVLGDFNAQLGREDMFQPVIGAHSKHGSTNDNGIRLILFAASRNMIVGSTSFPHKEIHKGTWKSPDGRTINQIDHVLIDQRHKSNLLDVRTFRGPNVDSDHFLVMAKIRARISNAQKERNHRTKMAAIKRAIDISAKETLGIERESIRPTWFDEECKRVTEEKNTAYQKTLQANCTRSLLEDYREKRRIEKMTHRRKKREWTKAEIECMELSKKKMKQGILKTICSITSLIRDEEGNIISEVNRLWKDGEDTLMTCESRDEQAEDISNDCEQGLDDEQPLDGPGLEIKKAKSLRKLKNNKAPGTDSIPAELLKYGGATLEQSLFELITLIWEQERIPNEWNEGILCPIHKKGDRMECRNHRGITLLNLGYKVLSNIIFDRLLPQVDKEIGMYQSGFRRGRSTIDQIFNLRQILEKTVEYRIGTHHLFIDFKAAYDSINRNQLFHALQEMGIHGKLLRMVKMIVVQGNYSDPLEIKNGLRQGDALACLLFNVALEKVIREAGLQTRGTIFYKSVQILAYADDIDIIARTVPALKEAFTALSQASKKMGLMINEDKTKYMACGKAYQPNMPSTFSVNGYTFERVDTFKYLGSTVTCFNDTSTEIKIRLISANKAYFALSNLFQSRLLSRPTKFTIYKTLVRPVLTYASETWPLTETDARLLDGFERKVLRRIIGPVYDGEQWRKGTMQNCTLYMPMLLWRTMEERYNAELYTIYADAPVTNIIRSGRIRWAGHVARMEESEVTKKILFGNPGGQRGRGRPRARWLDGVEEDLRKLGCRNWRRVAYDRDGWRKLVGKAKVHPGL

SEQ ID NO: 2993 - protein, 986 aa, synthetic construct
  source 1..986: note = Description of Artificial Sequence: Synthetic polypeptide
MKTNKTPPKRSFPRPLVTISINIEGISRDKEVLLSDLCKEYQCDFLLIQETHRGITRPSPKIDGMKMILERPHEQYGSAIFARPGINVTSASLTDRDDVEILTVRTQQYSVTSVYKPPDSTFVFTEPANFSYQDINFILGDFNCQSTAWGYKETNSSGAELEKWAEVHDLLLIHDPKLPSSFNSGRWKKGYNPDNIFVSKKLAAQSEKLIGEPIPHTQHRPIICTVSAVVKPEQVPFKRRFNFKKANWKKFREIIDLEVTKILHNLRCMTLLSVFRMCLGRQYARMQNTVYRWTSEDAKPLLERYQSSSTGNELMSVIAENRKAKWRDLVENLDMKVNSRGLGNCRTSTVMPQSQTINLLMSLQTSRHHTLLNGKPRQKIPQPLTRVLAEKPHLKAPFTMSELTAAISSLKTNRAPGIDELRVSKLKTLAVIPYSGCTESQQIKNLGSNTLQWLLDLMNACVERLHIPKMWRKARVVALLKPGKDPNDPKNFRPVSLLCHCFKILERLTLSRIENVLEQQIIPQQAGFRQGKSCCGQVLNLTQHIEDGFERKEITGVAFIDLTAAYDTVNHRRLLRKVYDVTKDYHLTSLIATFLQNRRFFVCLQGKKSRWRNQRNGLPQGSVLAPALYNIYTNDQPVPNTTRQFMYADDTAVAAQGTNFLDVEEKLSSTLESLSQYYEANHLRPNPSKTQVCAFHLKNAEANRELNVTWRGERLAHCPTPKYLGVTLDRTLTYKHHCNATREKVSARNNIIRKLTNGSWGANPKVLRTSALALSVSAAEYAAPVWSSSTHARKVDIAVNEMARIVTGCLKPTPVHKMYLIMGIAPPNIRRDIAAEAEKTKQEKDMRHPLYGHQPADRRLRSRKSFLSRTRALEGSAAENRIARWEMDLRSPHKAAKEELAPGGDLPYTVWRTLNRMRVEVPKCKTNMQRWGFLKDNENTLCLCGAVQDPQHLLICPYLEKPCTMEDLWEANDKAISAANFWKLEV

SEQ ID NO: 2994 - protein, 1360 aa, synthetic construct
  source 1..1360: note = Description of Artificial Sequence: Synthetic polypeptide
  VARIANT 96: note = Any amino acid
  VARIANT 767: note = Any amino acid
MESKIDVFGDSHAKGISQELQVISKSSTVTGMVKPGAGFKEVTKNIVKYKYGKQDSVVICAGAKDIYENNAMKMYKQLLSLILVLSNTNIILVNFXLRHDLPEWSCVNKEIHRINEKLKSCCRLFSNVKLIDSSTLHRECFTKHGLHLNNNGKARLGNLIRDAIKCNSKWTVTELGWYKCPTAETPAQTATAPRSTIQKTVATPTEQPTTEPKLTATSEPTSEVTVKTSKFNQPESSAFTTTVAEQTSVAVAPKQITSQPESLAYTATTAVAVVVAAVVTPEEGSHLQQSSHQKKAATFEKPGFLLGPGSEQQQIIGKHLNDCNQKNLQQGQLVQEADSNQGRESGNINRTAVSKNSNLKIMHQNIQYASKKSEELEVLLAAEVPNIFIMTEHGLKDSELKVFNLEGYKNVAYYCRNEHKSGGVAIFVDSKVGTTPLDISQIAQISTLKQQQYKSSWGGKCLIIGIYRSPSSSIENFLLELEVLLQKVMKKYTFVILAGDLNIDMLRDNDCTRRFQDILGSYNLQLHVKSPTRCTETSSTLIDHILTNIPTERQKVQVINTVIADHSGQTIELKDYAKAEDKKMIKYRQTNIANLNSLEILVKAEEWDDVYNEHSVEKSWESFCDILRHHINVACPVICKTVSAKQNKKWITKEIKKAREELIKLYEDYQKDKEQASQEAYRSKKKLYTRMIREAKASQYKHEIKTSTNISKTVWNLINDNRKESQTSKDTNIILEMEGVKVTDPLQVANSLNQHYVAIVEKLLNQXTPVTKSIKSPKWVAESLYLLPTNELEVSKIIGALKNKNTEGLDGISAKIVKHCAKYLATPLTFLINLTMKEGVFPNCLKRSKVVPVFKGGDKEDPGNYRPITITTVLSKIVERVINDRIVNFIDKHNILNEAQHGFRKGRSTKTAVANFITYITEALEQRRKVSGIYLDLSKAFDCVCHKILLKKLNCYGIRGNAADIIKTFAENRQQCVELKHKCRNKEEKVYSEFQQVKYGVAQGSILGPLLFILYVNDMPTEINEKVIMYADDTTLLVCGDTVKDLEKRATENFQMAERYFTENNLLINRKKTKCTKFETKITKSSEVFTLKIGSADLAEVDCNRFLGIEVDKHLSWENHIDKVCSKISTNIFLMRKMCYTWTQKPCGLFENKHKYILNEKNVLYVDTETLLKMYYGLIFPHLSYGIPLWGGAADVHIQRLLKLQKKAIRCCTHTETFKTSKESHQMLAKLSPRESCKNKFKEFKILTVPSLYIYMRQDTNCTKSVYIYETIVFLMVNCTAPLNSDIHNHNTRTKEQYHFFSKRLNMTDRDPINAGCRFFNKLPLSIRCIKERSAFKRKLKEHLISGCWYKVKEYLTENL

SEQ ID NO: 2995 - protein, 950 aa, synthetic construct
  source 1..950: note = Description of Artificial Sequence: Synthetic polypeptide
  VARIANT 32: note = Any amino acid
  VARIANT 51: note = Any amino acid
MDRNKLDVLGMCEVRWGGCGELESGDSDCTTXVKIKMECMELEYLRLYYSXEDKNGMYGVGILIGKRLKDKVMKVEYINGRIMMIRLKGKKEDLVIIQVYMPTSNHSEEEVEECYEKIENLAEREKRNACIVVMGDWNAVVGEGSEGKALGKFGLGERNERGQRLLEFCNENLMVVGNTLFDNHKRRRYTWISRFDNKRHQIDYIMIQQRYRNCLKSAKSYPGADIYSDHILVVAEVLVKLKRTWKGQKREFINIEKLKDKGICEKLENAFSEIIMPGQEMECIERRWDHYKNGLKRQLRKRKWVKKAAKETLGVKERKRVKKEWITPEMISKMDDRRKWKTVNTEEGKRNYRRLNNELRRETRKARVKWLTEKCDKIENLZKEGKYDLMYKEAMDLVFREKNSNSGIKEIEAADGKMVNETQEVMRRWEEYIEWLYDGDTRPSEDELGLEEENTVAEDDKGNAILTSEVEASVKEMKNGKAEGIDEIPVELLKSLQREGKKELIGLYNQIYMTGNWPKDFCESILIPIEKKKNSKKCEEHRTVSLISHTAKVLLRTLNRRLYGKLNAVMGEEQFGFRRGVGTRDAIGLLRVIGERYMEKKRKVYAIFIDLEKAFDRVRWDKLMAILRKHGVDWRDRKLITNLYLNQTARVRIGGVISEEIELGRGVRQGCCLSPTLFNIYLEDIIKESFNGSRGVCIGGRRVECIRFADDMVVMAESAKEMEQMLDDLNTKLEEYGMKINKKKTKSMVIGGRNTKCRLKIGGEEIEQVHSFKYLGSMIMDDMYCTAEIKKRIAMAKEGFKRKQRLLCGPLKKDLRKRLAKCYIWSVVLYGAETWTLRKEDERRLEALEMWIWRRMEQVKWEDRIRNEEVLRRVGEERNMLEVIRKRKRNWIGHCLRRDCLLKEGIEGMVKGKRGRGKPRYQMLDNIQGNKYEEMKRLALDREKWKRINP

SEQ ID NO: 2996 - protein, 1075 aa, synthetic construct
  source 1..1075: note = Description of Artificial Sequence: Synthetic polypeptide
MRMSVNKRSFSEPALKMTSVNIEGLSANKELLLSDICSKCKCDVLILQETHRGPTSHRPNIKGMILTLERPHEQYGSAIFTKPGLMVRSAAMTHVDDIEILTVELKACTVTSLYKPPGADFTFREPSNFQTQPLKFITGDFNSHSTAWGYQETDSNGEKVERWAESSGLKLVHDPKLPASFNSGRWRRGYNPDNIFVTEQIAQQSFKSVEDALPRTQHRPISLTVKAVVCPVTVPFKRRFNFKKARWRLFTEELDSKIDEILPAACSYDKFIQLIRRVSRKYIPRGCRNEYIAGLDDNIEILLKKYEELYNTDPFSEDTLETGEDLLRALTTTRREKWCDLVTSLDFKQNSRQAWSLLRNLSNDPTSSKTLHTSVTPNQIAHQLLLNGKTTHRSPRPSIVRDMENEHHSLEAPFTLEELQAAIDKMKNNKAAGEDDLRVEQIKHFGPKTLRWLTHLMKQLRQHHADSQSVEKSKSGSPIKTRKGANRCQKLSPSILAVPSVQGPRENGANNCVNTMQIPRVWRKARVVALLKPGKEPTDVKNFRPVSLLCHLFKALERMVLNRISNHVDEVLSPEQAGFRPGRSCTGQILNLTQHIEDGYERKQVTGVAFVDLSAAYDTINHSRLVHKVYQATKDFGLSRFVQCILQNRRFYVTLQGKSSRWRIQKMVLLRAVYGLWTFKICAVHTTEQAFLCHTARKKQQMENPKNGLAQGSVLAPVLFNIYTNDQPMHPDVRQFIYADDTAVAAQGSTFEEVEEKLTRALELLGNYYHQNHLKPNPAKTQVCSFHLRNKEAKTKLHVSWKGQELEHCYAPKYLGVKLDRTLSFKQHCLDTKKKVSTRNSIIRKLTNTNWGADPQVLRTTAMALSLSAAEYAAPVWKNSAHVKHIDVAVNESARIISGCLRPTPTEKIYPLIGIAPPSIRRQVAAEVERKKQLTDNRHPLHGHQQQPRRLRSRRSFLWTSEPIDVTVEERRLQLWKEATPNPILALKEQLAAGGNKSFTTWKALNRLRTGVSNCKFNLSRWGYLDGEPLCDCGNVQTDDHLLTCPNLSTCCTPLDLQLANDKAICVADYWARNI

SEQ ID NO: 2997 - protein, 943 aa, synthetic construct
  source 1..943: note = Description of Artificial Sequence: Synthetic polypeptide
  VARIANT 252: note = Any amino acid
  VARIANT 322: note = Any amino acid
  VARIANT 464: note = Any amino acid
  VARIANT 810: note = Any amino acid
MYNFNCRMESPLKVSTTPGGNSNEESTIALCNASGPRVLGSPNICIKGESEHPWYPSKLKFNRKFFAGTLNVNSLLKIGKQKELEILLDKHEIQILAVQETRFLDENITETKNYRIFKGKPAIKIMKGMPILGTAFCVHKNLVDKITEFKSSSERLSLLTIKCKNKQYTFVNCHAPINDDNKKNLSKVEAFWELLEDEISKIPKSNVVILLGDFNAQIGREKTFRKIVGEYPAHKRTNKNGTRLIGLCKTYXLKLMSTFFKKLPRKAKTWISPNPMLGEFQLDHVAISKHNIKEIMNVKVTRNREFDSDHYLTKIKMKLLPXKIQKRQQRLIKYNTDRLTITKDAIKHFQEEIKISKSGKWEELSKEINRVAKNVFGATKIMKKAWWNETCEEAVAERTKKWKKWKCSGKTEHLDEFKIQRKETARIIKSTKNFYQMFKNHLKGYQAPSICFRDENGKVGLSNXHNCEILRKYFEQLLNCEEPNCKLEFPDLHENTETDPPPTAEEIKKAINALKNNKASGEDSITAELIKWSQPKIISNLQLMFEEIWETEKIPEDWKVALIHPLHKKGDKQDVNNYRGISLLPVGYKIFSTIILNKVEATLDSHLGEYQSGFRKGRSCSEQIFNLKSIIRHRLTNSKDIVVTFIDFKKAFDSVDRETLDKVIREFGIKSKLANLIRETLTDTKSKVKLQGEISKAFDIKTGVRQGDGLSPLLFNCVLEKIVREWKQKLKDHKLSPIRLGTKHKGIEIHCLAFADDFAILSENLTNAEIQINLLEEIANKAGLRISVEKTKFMTNIKNAPEILVTDIGXIKRVNKFKYLGEMIQENGLEKFAVEERVHKMERAYGITRNIYNKRSLSKNLKIQHYNTVVKPECLYASECLVLNYKLHKLEVLERKIIRKILGPLRNTEVWKLRSNAEVYRNIENITETLRKRRLLFFGHLYE

SEQ ID NO: 2998 - protein, 805 aa, synthetic construct
  source 1..805: note = Description of Artificial Sequence: Synthetic polypeptide
  VARIANT 44: note = Any amino acid
  VARIANT 192: note = Any amino acid
RNGQMLIILYLFMTQNCHHHFTVKYGNKALIRISASAVLIWRQXASRQFITHSQRHNIDQLATSWPECLRRHKTADDTSRRRFNFRKANWTDFTSTLDNCIDELEPIPGNYERFVEKVRYISRITIPRGCRQQYIPGLSGESKGLLDQYNEMYEKDPFSNETEEVGNLLLKELSRTRQEKWVETIERLDMTXSSKMAWNMMKKLSADPIAPKQASNTTADQIAHQLLISGKTGTKPRSRKIHRNLESEVSLIDTPFGIKDLDNSIQSLKTGKAAGVDDICTEQIKHFGKNKTVDPTTNKVLLNKQIPKSWRKSKVIALLKPSKDPNLASSYRPISLLCHHSKFMSGNSELCGRKTNSRTRRFPPRKIMYRAGIGADRTHRERLRGENITGVVFVDLSAAYDTINQRTLLAKVYNITKDYELTKVIESLLQNRRFYVTLEGKKSRWRTQKNGLPKAVFCPQCCSTFTQTTNLLLVIQSTSFMLMTWPLGHSSSGQKLPAVEERLQNALSQMSVYYKENSLKPNPAKTQACAFHLKSKEARRKLQIKWDGFSIEHTAQPKYLGVILDRSLTYKSHCQKTRQKTATRNQLLKKLIGSKWGASPHVIRTTAEAVCFSTAEYACPVWNRSAHAKEVNIALNETCRLMTGCLKATPLGQLYKAAGCEAPATRRLAVEHTERFRQAFDDRHPLFEAPEPLRRLKSRRSFLRSVPMEPPDKYPLTQKPPPGYHLDWRSWKSLNRLRTGVAPVKTNLVKWGIIDESDVRCNCGERQNMEHLLTCKNCPRTCSLDDLWNARDNALDVARYWADVL

SEQ ID NO: 2999 - protein, 686 aa, synthetic construct
  source 1..686: note = Description of Artificial Sequence: Synthetic polypeptide
  VARIANT 541: note = Any amino acid
MIWDTVKSELDEQLQVEFLNLKSRQDQKLKKLMRQIDCRVNNAQNVDNFQFYPRVVNETDISFNDEELRLLNKGLKFNVQPSLNDKTVKELIVATKMAVDVAKLNENEKGHVGYKLANAIKAETNKSCNSMHNNSDHKTVTSINDKLISNKAIVTKADKGNTTVIVSEEQYINKTLQFFSENGVTEIAKDPTKKVQAELKQLLKRTSFLLTEKEKFQCYVMNPTAPRLRSQLKVHKNGHPIRAIVNSMKGPLCKITKKLDKILKEFYVFGDNFSVSNNTTLINEIKDKPIADTSHLMSLDIKNLYANVPVDEAVELIKANLLKHKRLSQQEIVEFIDLLQFILKYNYFAFNGKFYIQKDGLAMGSSISGTIADIFINNLENRLFTNMQHPVDKILYYKRYVDDTLLLIDGGQTEITEIVNKFNSLHEKIEFTVEQEKDGTLQFLDLNITKQDGRHLFKVYRKPTTTDILIHNSSCHPNGQKLSALRCLVDRAFKVPMNEKDRTTEFNIIRQLAKVNGYQENVVNNLIRKKQRAKSNKNGTXNIKRVMVPYFGNLSQKVANILKPFKVEAAFKTNNTLHHKLRNNLNQETDKYDKAGVYKIQCSSCNANYIGQTGRSFKVRYKEHMDAFRLNNFDKSAVAMHIRETGHPLKRIEDDLKILHKQDKGRKLDLLEQLEITIHNAKATFH

SEQ ID NO: 3000 - protein, 1912 aa, synthetic construct
  source 1..1912: note = Description of Artificial Sequence: Synthetic polypeptide
  VARIANT 14: note = Any amino acid
  VARIANT 50: note = Any amino acid
  VARIANT 90: note = Any amino acid
  VARIANT 92: note = Any amino acid
  VARIANT 94: note = Any amino acid
  VARIANT 121: note = Any amino acid
  VARIANT 170: note = Any amino acid
  VARIANT 249: note = Any amino acid
  VARIANT 261: note = Any amino acid
  VARIANT 286: note = Any amino acid
  VARIANT 315: note = Any amino acid
  VARIANT 353: note = Any amino acid
  VARIANT 357: note = Ile or Leu
  VARIANT 387: note = Any amino acid
  VARIANT 412: note = Any amino acid
MALPGAKPASLSVXGPNLMLRHMTPRRSLPWPRHGRNAGREIEVRLMPPXTWYVPGLTANRLPPRSPCFLWKTLRISSGRWMACQDEIWXCXHXDVVPSPVTGTACLVRGGGWHVKMRSGXVLITTSSPAQSRALLACDKLGDVPVSITPHKSLNMVQGIIFHKDLLLQXDDELRKNLERRGVHFIRRVHRGPKDNRVATGAFILAFEGDSLPEKVKVMIYRCDVKPYVPPPMRCFKCWRFGHMSSRCXGNPTCRECGRAXHPDAPCAPPPVCVNCGQHHSPCSPXCTVLHKERKIMEYKTLDRLSYSEAKRKYXKLHPVSMKTSMPQLHHTASAISATALHCLVFHSGPPGXTAHXCPHGLWGHLNLHRPQGPYFGSSNHHSTCGXISPHPPPLHLWGHQSPPLSQRHNSXLWLLSRGRGPSDPFLLRLLLLKDTSRWLKEPPTAGRRASRAPQFLGTEPAEPSQHEKPKEQRETKEKDKKPPKRRIPWWPPCHHPPPPLLLRTRETTQEKDSLVATVPPPPSTSSSEDEIEILASPKDLAIAESSEAMDVEALPQKSATAEDTVNPTAPSKSACPSDQEALGSASKIGDSRRYCEPYCAVEISMSQRPGGSLILQWNCGGFFRHLPELQQLLCRFPAFCVALQETWFPAQRTPALRGYRGYYKNRTIYDRVSGGVCIYVLATVPSAAVPLHTTLEAVAVRIRAMQELTICSLYLPPDEMVSLTDLAALVAQLPPPFLLLGDFNAHHPLWGGAQTTGRGRDIETLLSQQDICLLNTGAPTHFCVARGTYSAIDLSVCTPSLLPHFQWRVHDDLCNSDHFPVLMSLLDFQPAGCPSRWSLRRADWQRYTSAATVPVPLPADVDMAVHQVTSTIVSAAEATIPTTSGSPRRKSVPWWTPEIAEAIRDRRRALQRHRRHPTVENLIAFKRLRARARQLIRQSKRDCWETYVASIGCRASRLGCGPRLGAFLGTVHQQRSPAYTSRVTYAPTRLPSLNTWQSIMLAPLQHQNTVQTSVHTGLLGDVCRQHRLSRLASRVWSQVRRLFGYRPPAAIPSLHIQGNLCTDPTSIAEHMAEHYARTSATSEYSADFRALKERVEQRRLSFHTRRAESYNSAFSEWEFETALAACPDTSPGPDRIHSQFIRHLSVEFQHQLLALFNRLWAEGAFPSQWRESIIIPVIKPGADPQVADSYRPISLTNVLCKLFERMVSRRLMWILEHRGLLSPHQGGFRQGRSTVDNLVALESAIRTAFSRREHLVAVFFDLRKAYDTTWRHHILATLHGWGLRGPLPLFIQNFLSFRSFRVRVGTSLSSPRVQENGVPQGSVLSVPLFLIAINGLAEAVGSSVSSSLFADDFCLYFSSASIGVAERRLQGAIRKAQSWASTHGFQFSPSKTRVMHFCRRRAVHLDPELYLYDELLRVEETHRFLGMLFDSRLTWVPHLRQLKQKCVRYLNILRCLSHTSWGAARTSLLQLYRALIQSRLDYGSFVYGSAAPSALQVLDPVLHSGVRLATGAFRTSPVASLLAEAGVLPLRFRRQQLLSSYAAHVHATPHHPNRRLLFPAAALPSPRQRPRSGLPIAVRVRSLLSSLESLPIPPTFHCPYRTAPWSLPRPQLRLDLSHASKASVAPLSLRRQFQAVLESFCGAEVVYTDGSVVDGRTGYAYVHGEHIEQHSLPCGSSVFTAELVAIYRALEHLRACPGESLVICSDSLSGLQALAKCFPKHPLVQSIQESVSRLVRSGRSVVFVWTPGHIGIPGNERVDQLAKQATTSSPLAIGLPESDLRLEFHRKILGLWNSEWANSAQPNKLRAVKLSTVAWKSSLRSSRRESVVLCRLRIGHTWLTHGHLLRREDAPQCDCGAPLTVVHILVDCPLLVALRQSFNLPDALSFMLGDDAAMVERVLDFIRAAGFYHVI

SEQ ID NO: 3001 - protein, 552 aa, synthetic construct
  source 1..552: note = Description of Artificial Sequence: Synthetic polypeptide
MDPDIVILPADKGNATVVLNKQDYLQKMQCLLSDSAYRRISADPTKSVERKTNNLLKKSSLSQETIKSLNSYCAVPPRLYGLPKVHKDGCPLRPIVSNIGAPTYRVAKHLAGLLSPLVGRCEHHIKNSVDFLRRLEGLHLADSDILVSFDVVSLFTRVPLSDSLQLIETKFGTDLTNLFRHVLTSTYFLFNDEYYEQTDGVAMGSPLSPIIANLFMEDFEDRALESAALKPACFFRYVDDTFVVWPHGSENLNYFLEHLNSIHPNIRFTMEVEKNGCLPFLDVLVRRKADGTLGHAVYRKPTHTDLYLQADSCHHPAQREGVLRTLVHRAHVISDPESLPTELSHLEVTFRQNGYGEGQIKRALRYRPHVQRASDDSTESAPTSVAFLPYVGSTSNKIGRILRKNNVKCVFRPPSKIKALLGSVKDDLGLRKAGVYRIPCSCGMSYVGQTIRTVEDRCIEHKRHTRLQQPNKSAVAEHCLDTGHPMEYNKTEILACTSNYWDCVIKEAIEIKLGDNLMNRDGGFCLNSAWDPALSLVKKQRDKTNPTSSVEN

SEQ ID NO: 3002 - protein, 1017 aa, synthetic construct
  source 1..1017: note = Description of Artificial Sequence: Synthetic polypeptide
  VARIANT 532: note = Ile or Leu
  VARIANT 611: note = Any amino acid
  VARIANT 612: note = Any amino acid
MLFHQNVQSLNNKLSEIKIMLSNELIDVSVLCMSEHWLRDDALQTVSILNYELAAYTCRQQILGGGICIFVKKGLKKSFFFFLFFFFFFFEISAIELPSLRDNFNMHLQIPNGDIKTFYQNLENTLTQTVKNKQTIIICGDFNIDFKGSAKEKTDLMNILVSHTLKITIHSPTREIVTLSLQVYNRSNNNKPTKEQYKAEAVKTGLGDHHGQTISFHIKGIEVNKLTSTYKTRTYNDQEIEIFKNLLKSESWEQIYDTSTENISEKFDIFIEKIKYYFDVVFPVKTRRLKDTLPKKIPSQNKWITTGIRISCANKRFLYRLTKTCDTTPAFDRYFKNYKTVLRKVIKSAKKLENDRYISNSSNKMKAVWNIVKKETGNNKTKNKNIQLKENQQTTSKPKEVANMFNTYFINIAEKLIEKNVIKNPSQLATKIKHIDKTIFLTPTNTKEVQQEIKLLKSKHSSGIDNIPDFIVKKCADFLSEPLTYLINLSFSTGSFPKCLKIAKVKPLHKKGSQEEVSNYRPVSQLSAFSKXLEKLFIKDCPISQNPNMVLEKNHSTETAVFSFLYETLQALDRREHTTSIFLDLSKAFDTINHNKLLSKIQNWGLGAAHXXIKSNPHDRKQFQKAVLIEITYESNGTVSTYHSDSLVVKHGVPQGSILGPILFLLYVNDLYINNTNGKLYQFADDTSILITGSTKEIFESNIAAITKNIRDYFDANGLIINVEKPLQWIYLRHRIDHQLTQILICKWPDNKCGKTVAMDIFTTQNRSPANPNIDINGKTIEKTECTKFLGIWIQQNIKWDSHVDYINRKLSKTCYIMRTLKNSISYNNLKSIYFAYAHSQMKYGIVFWGNSGASMKTFRIQKKIIRIMEGVDQRTSCKPLLKRNTPTSKHVHNGKPNYYKRKIKKEILPLPSMYIMENLIIIKEKLNSKSPCITRNETVHCHNTRQKNNVHVKQTNTALFQKGVLHPGIRLYNALPKAIKSKTDTTKFKTAVKDYLVMHCFYSVDEYLEFQNYSIS

SEQ ID NO: 3003 - protein, 760 aa, synthetic construct
  source 1..760: note = Description of Artificial Sequence: Synthetic polypeptide
MSDWAHRSAVDKQSSKFQRLSRPSISHNTNRRTVINFTDKELDDAMLSVLEKGLNFAPTPKNVPLTEFICSVEQAVSKLPGDQAEEIRQEVAHTLRRAPPPRSNISPLERAAIRSLREDQDLIILPADKGNATVLLSRDDYLRKMDCLLDDSAYRRLQKDPTERIKRMTLSLLKKSSLSDDVLKKLHPGAAVPPRLYGLPKIHKQEVPLRPIVSNLGAPTYNLAKHLASVLSPHVGKCEHHIPNSMDFIQRLKSLRLSPSDLLVSFDVVSLFTRVPLEESLQLIGEKVDKETAELCRHVLTSTYFLFNDKFYEQTDGVAMGSPLSPIVANLFMEDFEDMALKTAALKPTCFWRYVDDTFMVWPHGEEALNRLLDHFNCMHPNIRFTMEVEKEGKLPFLDVLVYRRDDGKLGHSVYRKPTHTDRYLHASSCHPPVQRTGVLRTLTRRAYAISDAESLTQELDHLKVVFKQNGYTDKQIRCAFQFGPSPEPLNETHKSVAFLPFAGSISSKIGRILKKHDIKSVFRPPVKTRALLGSVKDDLGLRKPGVYKIPCQCGKTYIGQTSVPFRTDVLNINATHVCSSPRSRRDSLSMWENVYWSDIRTIQDRCVEHQRHTRLLQPEKSAVAEHCLDEGHRMLYNETHMVASASRYWDCVLKESIEIRLSDNLINRDKGYLLSKSGTLCYQMLKNNGWYFRNLNNNFLIIDYRFRRILPPERCMSCAPEGSYCHFLRTRYGSSAMYKGAADCTGNSVPARLCTSTLT

SEQ ID NO: 3004 - protein, 1058 aa, synthetic construct
  source 1..1058: note = Description of Artificial Sequence: Synthetic polypeptide
  VARIANT 103: note = Any amino acid
MKRPFREKFPPSNPIGKEKATSDSVGSQLEDSNESEHLKSPNYHQARNAKIKHKHINYIATHNINSLLQTGKLKNFTDELNRQNIIIAGLQEMRNTIEDPFEXQGYRIYNGKPGQRVMKQCPQFGTGFIVNLKVIDSITDFKAISPRIATLTLKATNKIYTIINAHAPTNQKNFLTRTMVEVEKFWDLLDQTINQVNKNHVKILIGDFNAQLGKERKYRDIIGKWAPHKHTNRNGQRLVEICRTYGLISKSTYFKRKPSKLMTWKHPDWTKGEWQLDHVCMDKFFHKEIQNVKVLRGMDTGSDHYMVNIKIKFTPLSKKRQRALEIKESMIHINKKTESIGDKRKYDPHKLIKNDKYQKNTQNTVITDNLQELIPILKQHAEESAPVNQTSKKHAWWTTECDEIHDERHQAWIKFQTHRTEENAYNLKNIRKKFSQIIRKTKRLYQKDVLSSIEENYHETNSRDYFKAFDKQLRKFNPPTLLLRNKDGRIAHNNKENAEIMAEAFNKLLNLTNLKSFKAFNNRHKHPCNNQTRKYSPPTVQEIETALKEMRNYKACGENQVFAEMWKYAGTTTRTSLHTILQKIWTTEKFPEEWTTAIITPLHKKGDKSDPDNYRGISLLDCTYKIFSKILHNRIREQLDKELGEYQGGFRPWRSCAEQIITLKLIMAYYRKRNKPLSITFIDFKKAYDSIHRPSLLKILRHFGLHLKLIRLTELTLTNTNSKIKFEGNFLDHSIHMREWYKANPKNIKVGTQKDNIKLNCLGFADDLALLANNIQETKQQIRSLQEIAQCIGLKISFEKTEIMVTEPPLANKIRIGVHNIKIVEKFKYLGEIITHNLNEKPSWQSRINKLIKMHHVTKNTYNKKCLSIATKLKHYKTVTQPQITYASETIFKTTNTVAIDRLLKIERRIVRTCINKKYQKDGIWRIASNETVYKEVEPVTSTMKKKRISFLGHLMRTPENRISRKIIEKLWNSKSNIRWITEIKEDMMKLQITMEDLKDKTDTLKILQDKHVTLPIKINKQRLGRVISDEERRARSERMKKYWANKKKNKNKNNRRT

SEQ ID NO: 3005 - protein, 1264 aa, synthetic construct
  source 1..1264: note = Description of Artificial Sequence: Synthetic polypeptide
MIKKNVWFQTVKSMCVQEKKRVVPDCEIDVRPGIRTNQLNNHFKNIQQAKHNSKNVTNSENYKGVFIHVGTNSLRSCSEEDLVNETRNVIRSAKNIYPYSRIIISSILRRRSVSDKYIDKINCNIRDQCNRLGAIFVDSNKFIRDDCIGQDGLHLNRLGSATFSKMFIDLCKIIRNRGNWQSVRGVNPVQNYTKQGKLAVSEGGELKHVVDKDTTKEDVLKTVNRYNSSFLMHWNIHGLRATYLQNKIAKIDELQIILSEGRNIKVVCLNEHWITEDSITVLNKLENFNVASSFCRKNKTHGGSCILINSSLEYKERDDFNFLNEELIFESCCVELEQQNIVIISIYRIPGNDVTKLFFDKFQCLLQKLTKEMRKKIIIAADFNIDTASETSISTKFNDLIQQYGFRLNFTEFTRVSDKSATCIDNILTNYTLNENAKFTLNLGISDHYALLMELLKTNKENGRKCFLKRQFNPDNIHLFCCRLNDIDWSLQHESSCSENFDRFLNSFLHVFNETFPPMSAKERQQVSNISTHVCQRKTTSKLKWITTGIKISSKRKRELHAELKSNKSPEFIKYVKSYKKLFRKVVKAAKEMANTKFIRKHKNKSKAVWTVVKSELGIKPSNQEISKLKIQDKIIVNPAQISETLMNFSTKNTRQNNCKSCSDIRNFNEFFITVAKSDVNVPSYQDNVHLFGSSLSKNECLIKFDTVTVEDVEKTILNLKNKNSVGWDEIPSKVIKAASNIIAYPLCKIINQSLEEGYFPDSLKYAEVKPLFKKGSKEDMGNYRPISSFPCFPKYLKYQKQFGFQKGKSTIYAINEFVNKVTSTLDKSQKAAGIFCDLSKAFDSVNHSLLLYKMEKYGIMGTALQWCTSYLTERKQRVVITSSKGKYSSKWRLSHRGYHKAQFVETIPQGVPQGSILGPILFLFYINDLPININYHSVLFADDTSVLIENKKADEIPDNVLKTLENLDVWFHLNGLKLNIKKLRCLKDPRKPRCLVPSKWSKIKYKKTQVMQFKTKQSKLNDIQIKHNSQELHEADHVKFLGMKLDRIYPGPHTILGNETGQNLSWSSHIDYLKNKLNSLAFAMSILANVTSLDTRKIVYRSYFESIVRYGIIFWGNASTMIRILTLQKKIIETCGAKPRESCRPLLRDLNILSVPSLYLFEIILSIIIQNYFFIITSSTVMKQEQRQFHAPTHRLNLYAQAPQYMGMKICNKLKNTHFRKVETESMKRKLYSTLVQKCYYSIDEFLNDDLSIEQDKTYNYVL

SEQ ID NO: 3006 - protein, 1071 aa, synthetic construct
  source 1..1071: note = Description of Artificial Sequence: Synthetic polypeptide
  VARIANT 60: note = Any amino acid
  VARIANT 437: note = Any amino acid
  VARIANT 535: note = Any amino acid
  VARIANT 607: note = Any amino acid
  VARIANT 702: note = Any amino acid
MLRSALTADPFTTGLHSNGQHSDRSFSRPFVFISINVEGFSREKEVLVANLCQKYSCDIXLVQETHGGSTKNRPRIAGMELILERPHDKYGSAIFARPDVNITSASLTEDNNIELLTVQTPFFCVTSVYKPPVPILASKHQPTSTIRTRQQHRTPHSANSVFLCYISLQTTCANFSIKTPANFNDQDVNFVIGDFNCRSTSWGYPDSDTNGTSLETWAEAHDLHLIHDPSSHLHLTVAGGKEGTTQTTFCFFKGSCTMYEDCRRAHPSYATQWQVEKRVQPRQHFVSSKVAAQCTKTVGEPIPRTQHRPVICTVNPVVVPEEVPFKRRFNFKKANWQKFSEELDSKVINIPPQPEMYETFIKCVQQVSRKTIPRGCRTQYVPGMSSDDKLLLETYQTLYEEDPFAKETIQAGEILLETISATRKAKWSNLVENLDMXLNSRQAWKLLKNLSGDPVKSQDNFTSMTPDKVATQLLQNGKIKGRTPKEALQRVPETEHHFLRDPFSMAELEAAISSLKMHKAPGVDDLRVEQIKNFXCKTMEWLLSLMNKCVAKLHIPKMWRKSRVIAILKPGKEPTDPKNFRPISLLCHTFKILERLVLNRISATLEXKFIPQQAGFRAGKSCSSQILNLTQHIEDGFERGEISGVAFVDLTAAYDTVNHRKLLRKVYDLTKDYQLTSVISTFLQNRRFQVSLQGKRSRWRTXKNGLPQGSVLAPALYNIYTNDQPIPANTRLFIYADDTAVAVQGPTFKEVEKKLSLAMDELSKYYDANHLKPNPSKTQVSAFHLRNREAEHKLDITWRGEQLKHCPTPVYLGVTLDRALTYRQQCLNVKQKVSARNGILKKLVGSSWGANPHLLRTSAFALCISAAEYAAPVWDASAHAKQVDIAVNDTARIISGCLKPTPVQKLYPIVGIAPPNIRRAIAADYERTKQETDHRHPLYGHQAARHRLKSRKSFLARTAPLEGAPEANRLATWKSSLPADVSPKEEIAPGANLQYPVWRSLNRLRVGVPRCKSNLKKWGILPASADTSCDCGADEDASHLLVCPLLDNTCTAQDVHEGNDKAIAAAIFWKC

SEQ ID NO: 3007 - protein, 980 aa, synthetic construct
  source 1..980: note = Description of Artificial Sequence: Synthetic polypeptide
MTSQHRTFSGPIMTIISVNIEGLSLCKEELIKDLCKKNKCDVLCIQETHRDSILNRPKIQGMRLVAERPHRQYGSAVFVKSEIQVLSTSVSDINDVEIVTVELKNCTITSVYKPPLSNFNVNATHKHNSTKVNFVIGDFNSHSTRWGYPQDDENGMAVISWAESNKLALIHDHKLPPSFNSGRWQRGYNPDLIFATESVSQQCIKTVCPPIPKTQHRPIMCQVMTAVRPVCVPFRRRYNFRKANWLKYQEILDREVAFLPPNPDSYDKFTDAVKRSSRLSIPRGCKTEYVQGLTPETVADLHTYTELFEKDPFDESTVAAGQQLLASISEAKRNSWVNLMEELNMSINSHKAWRLLKRLSNDPTSLNNHANITADNIATQLLKNGKPENRSRRQTKNMSNTTEDETNSLSQPISIDELNEAIAKCKNGKAAGLDDILVEQIKHFGPQTKQWMLNMFNKCMADCKIPSIWRKSKVIAILKPGKDINDPKSYRPISLLCHMYKIFERILQTRLTYVIEPKLIPQQGGFRPERNCTSQILGLTQFIEDGFQKKRVTGAVFIDLTAAYDTVNTRQLIEKLYEITRDRKFTDIIRNLLQNRRFFVEFQGKRSRWRNLTNGLPQGSVLAPSLFNVYTNDQPLPVNTSSYIYADDRVIAAQGQSFEDVEKSLNEALVELDSYYCRNQLKPNPMKTQTCAFHLRNKQASRQLQVRWRGVDLEHCKNPKYLGVTLDRALTFKQHCLNTKLKVCGRNNILRRLTGSTWGARPKVVRTSALSLAYAAGEYASPVWCRSAHAKQVDVALNESARIVTGCLQPTPVNKIYHLAGIAPPAIRREQAAYKERQKSIVSKWHPLHGMEPAAQRLKSRNSFLTSTEKESDYRTTVERWKDAERHPWMEPSEALAAGHNESWTTWKSLNRLRSGIARSKVNLSKWGYQNDSTLCDCGAIQTTTHMYNCPLSPSHCTFEELMSAQPNAIDVALFWAKNV

SEQ ID NO: 3008 - protein, 1288 aa, synthetic construct
  source 1..1288: note = Description of Artificial Sequence: Synthetic polypeptide
MYIFSDSHGRGIASIMQTMQMKFKVTGITKPGAPLCIITNSKLLALPNLVPLYVLLHKTDNLKQISHVSNMWQSNHQGGFQNVMFVEATSSVRTISPNMVCTGIIMAKQFCARKYDNINSQRQEIHSPIPLSLVKEKEVTSHTQNEEKEQETSLSSPKKESPLLTLKRKDNWKRSVQKEKKNHHPVLRKRTRNITVFPQKRITIAHLEKKGQLEKKRAEREEESSSCSIEEVLSLSAPEEETFSSAEKLPAKLRRGERTKKDIPLKNQDFFIPAAGEKTTRYKLDLRKTKVVPRDQLHKFQGISCTNSIGQNVMFLHINVQSLKYKINELQFWLENLNCSILSVNEHWLNCEELKLYVPFGFDLASSYYRTNVEHGGVSMLKIMTWWSVYVKNNVNLIYEVTDVSELCIEAKFEAAAIKFPKQEIIVGSVYRPPKHNESLFVENLEKLILLLLKHKNYRIVIFGDINIDIRFKNRNVNHLLNMLRSLNFYCINTKPTRQAACLDNIICNFHLNKTDFDTISLCISDHDGLWLRQTLNYKILETSTEHRIIRPINDSKLNQLISKLNIVKWDEIITNVDANEATNRFLLLLAELFETCCPKHYRKSVKQRQCSKPQNLKKTGILHITTKSKKNWYTPHLNRIRILMLLYHDKAKHNNADKEMYMKIKKLYRSEIKAAKCKANDAYILNSTNKCKAAWEIIKTEMNYDHKVYQIPISPNTLNEHFVGPHSDSSTMQDVRKAEALLPETSSNLTNNFCWSRVTEKEVYESVAKLSNSRAEDYYGLSNFVIKSVRKQIVKPLTKIINKILEGGHYPECLKISVVKPVYKKGEVTSPENYRPISLIPIISKIIEYCMHKQMYQYFETNNILSASQYGFRSRLSTTKAVESIVSKIHSSFEKKEIVCATLLDLRKAFDMVSHNILIKKTPALWSERECYMPDGVLLGEQETVSQDKKKLQHYGVRGNAICLMESYLENRKQLVKINNESSECLPVLKGVPQGSVLGPFLFIVYINDLPTVVPCDAVLYADDTTLITCDTNLENVQHNMAVAMEKCNTWFEANVLQKNDSKTEEIVFNLTAPSQDNKTVKLLGFHIDQKLNWDTHLDKLCSRLARVLHLLYKLRSSVSKELLLYAYSAFFHSHLDYGIILWGNSVGSKTVFKWQKKAIRCIAGLSPRDSCRGYYKELNIMTVPSLYIYNCLVYVKENLNNYDLRMTIHDHSTRSGHTIDVPYARLAKTHNCYKYLGLLYFNKLPKEAYTVPVDQFKNTIVKWFKSKVFYSAQEFLECGTKDLNFL

SEQ ID NO: 3009 - protein, 1030 aa, synthetic construct
  source 1..1030: note = Description of Artificial Sequence: Synthetic polypeptide
  VARIANT 364: note = Any amino acid
  VARIANT 452: note = Any amino acid
  VARIANT 487: note = Any amino acid
  VARIANT 1027: note = Any amino acid
MGQLPIHWKKTLPVKKPIRLQQDGYNRRRRRLRKRTVLIGVWNVQGLQNKVGEVIKEMEARNQDIVVLPETKKKGHGIERIGPYTHFYSGVPKNQRAKRGISILMKNKFNRMVTNWEPIDENLIKININIQEHKITLIGVYGISEDEPIRKKDEFYNRLNGVIEDIGKTREIIIAGDFNSRTGSKIGNKIIGPFGENVVNDNGNRLIDICEQNSLKILNGFYQHKDIHKYTWHKDTLNQKSIIDYIIIKQQTRIKIHDIRAYRGVTLSDHYLVNSKFLFPFRGKNSEENQNCTTEDLQTEIKITKYNLNSFENESTVFLYQKRLDEKLIETEFDNTEDQYQYIISKLHESAKEALGETDEKHTXHSLYYWDEEIKKEVKLKKEKYLKWLNTRNVQDKIELNAQQAKIRKKVAEAKNKAWEQSCQKIESYIGGKRNTEAWKTIKNLRRNSKEXTHIKYITHDSWEKYFQNLLSENRRILGKPEGILKXQHILNILLMTLGKNIFKIYYQKTEEFLGNPEYNEITNELPDNYIHLEIETVKSAIKSLKNGRATGIGGIPAELLKFGTEKLIELLRNLFERCLNGEDVPNDLKVGYISVIHKKGRKDDCKNYRGITVTNTFSRLYGRIIKYFLEQEYKEKEAEEQAGFRAGRSTIDHIFCLQQIIEKNKKLGRAQPIHLVFVDIEKAYDSVPLPNLWKALLSIGINPTIIKAIQNLYKNSISKIKIGKFLSSGFQVTKGLRQGCSMSPTLYKIYTEVTLQNWKKKCQTMGIPINDRTIYSLQFADDQLIIAQDYEDIEYMTRKLIQEYKKAGLNVNMNKTKYMVIGGINEDLILEEGMGTITTTEEYKYLGVKITNDGKQEKEIRSRINAGKTTISLLNGILWDKHITTDNKIRIYKTIVRSIITYGSEVWTTKWQLKSKLLATEMDFWRRSARISRRERIRNEVIREKMKCKNSIIEFIEHKHLKWYGHVRRMGQERLPKCILDWTPNGRRKKGRPPTTWMQEVQSAMRKNNIPEDLWEDREEWRTIIXNLM

SEQ ID NO: 3010 - protein, 825 aa, synthetic construct
  source 1..825: note = Description of Artificial Sequence: Synthetic polypeptide
MSTQFLKPVNKLTTWKSPNSTLGEFQIDHVAISNKNTKEILNVRTRKGFFESDHHLLQIKIKFQPNRKKPQMNKTFRIDPEYLKLNKKEISQEIRQSNATNWKELAEVLKSTMHLGKPPRKRKHRWWNSSCDQAIEERTQAWKTFSSNKTTEKWQEFLRIQKNTSKAIRREKRRYDINRLKEIEQEFLKNNTRNFYTIFKENLTGYQPPNLCFRRPDGSLETNTRNNCQILANIFTHSSTASRRQSNISKTPSNPDSKPPSLKEVKEIINSLNNKSPGEDGIIAEMWKLNDSTLTQATHRIISKVWETEQIPAEWKCALIHPLHKKVQKLIQITTGEFHCSQLQGNFTAPSNIQNFFKGPVKQTRRTGGPVNRRVSGRVSRSILRRTNMEPKDILQMRRCRNTVVTFVDFKKAYDSIDRQTLFHTLEEFRIDRKTRSIIQQALTGTTSKVKFMGETSEAFHIHTGVRQGDGLSPLLFNLVLEKIVRTWEKEIKGIQLGIKKEQRIRVKCLAFADDLAILTNNREEARLALEKLHEISQKTGLQISYEKTQYMENKLQIVSPSQPSMEKWHKFLTSDIKDSVHGKQAADSLPITTQYGKVAQVSHFRYLGEMIQPSGLNSIANQERVSRLQRAYKLTWNHYNKKSISVNAKLRHYNTVVLPEALYAAETTVIHGHTKIREIEKQERKILRKIYGSVFREGIWIKRPTREIYKDMETITDTIRKRRMKFYGHISRMNETRLTRQIFEIANKSKNKTKWITETEEDIKELGITQDNINNREQFRNIIKKHKLKQEHTENRTGKKWSERKREHSERMKRIWEERKKKKS

SEQ ID NO: 3011 - protein, 1046 aa, synthetic construct
  source 1..1046: note = Description of Artificial Sequence: Synthetic polypeptide
  VARIANT 279: note = Any amino acid
MCPAFAEKDAATPQPAAVALPTSGIIARATTERTKLHVAHANVQSLQAHLVEFRHIFQDLGLHIILLSETWLKPSITTSSVNLDGYVFLRHDRLNKRGGGVGAYIRSELSPTVLHTSNNDETEQVEYMFIEIKPLKEKCLICVLYKPPKVGALDCFETALSDLESTYEHIIIAGDTNINFLFNSPSCMKFKRMLTSSNLTLLQLAPTHHTADSHTLIDIFATRFPDRVIRTSQTSAPGMSAHDVIFMTYSLECPRKKPLLTTYRDLRRVNLPELTADAXEIVFEPTSDTLPDVNEKLHKITNKLNQLYDKYAPIKTKKVRRKPAPWLTDELKQLMNLRDTAHRTYKLHPTPENHTAYKQKRNRVSQAVRNAKLRYAHSLTDNINRPAVLWKNLRGLGIGKVKTAAEPTVPIEELNQYFTTPTTTIDHQTKQTLIDHITRINNANHDKFCFKHVTGSTVKKAIMRITSASTGDDGITIQMIKLIIDPLLPIITDIFNQSLATSVFPDAWKRGLVKPLPKKDIATAPSDYRPICILPALSKALEYIVHDQLTSYLTINNLLDEHQSGFRKYRSTTSALIKVTDDLKQAMDRQEATIMCFLDFSKAFDTVDFDILLAKLSSLNLSQGVVQWFRSYLTSRLQCVMSGTEKSQWRKVLSGVPQGSVLGPLLFSLYVNDVSSVLSFCKYHMYADDLQLYLSAKPKNLKTAIENFNSDLCALSKWAQNIGLKLNPSKTQAILVGHPRLINHKYRESQPSLILNDTPIYFSPSAKSLGVIIDDKLNWAEHTAAVCRKASASLHALQRYKKFFPLDLKKKLIQTLVIPIIDYSDVILQGLSWESSRRLELIMNACVRYICNIRLFDHISPSYKQLSWLRADKRRDFHTLCFLYSLINVHCPSYLSSTLTLLSDQHNRTTRSCQSKTLSVPIHHSAGFSKSFSVAGTRLWNNLPQYIRELNNTASFKRQLMDYLLKQLRQSLIPYGPGTSHPFLLPDILLLPLLSPGTAFLTSFCQNSPCLNQSRYIQKYILYLLISMLLLLLLHQQQQKVSQWYC

SEQ ID NO: 3012 - protein, 808 aa, synthetic construct
  source 1..808: note = Description of Artificial Sequence: Synthetic polypeptide
  VARIANT 274: note = Any amino acid
MVIGCFYRPPGSAAVVAEHLKENLENISSRFPDHVIVLGGDFNLPDIDWETQTFMTGGRDKESSEIVLSALSENYLEQLNREPTRGDNILDLLVTNRPELFETVNAEQGISDHKAVTASIISAVNRNIKKCRKIFLFGKSDKKRISEYLTAQHRSFISSTDSVEEQWSKFKAIVQYALDEYVPSKIVRDGKEPPWYNNRIRKLLRKQRELHCKHKHSQSLVDKQKLNEAKCSVRRAMREAFNEFESKVLCTDLAENPKKFWSYVKAVGGSKQNXQTLCDENGIETEDDTLKAELLNVFFQSCFTEEDCTVVPSLDCRTDYKMADIEIIDRGIEKQLKSLKRGKAAGPDGIPVRFYTEYAKELAPLLAVVYRRSLEERSVPKDWKMAQVIPVFKKGRRTDVQNYRPISLTSVSCRILEHVLCSSIMTFLETRNLLCRNQHGFRKRRSCETQLALFVHETQRAIDTGSQVDAVFLDFRKAFDTVPHRRLMNKVRAYGLSDQLCDWIEEFLDNRMQHVILNGEKSSEVRVMSGVPQGSVVGPLLFTIYINDLADNIGSSLRLFADDAVVYREVVTMENCIEMQEDLHRIDAWCREWQLNLNVDKCNVLRIHRKKDPLSFSYTIAGQQLEAVNSINYLGVGIRSDLKWNDHIKSIVGKADARLRFIGRILRKCSPKTKEVGYSTLVRPQLEYCSPVWDPYQVGLIEEVEKIQRRAARFVTGSFGNRESVTEMIDKLQWKTLQERRSVARYGLLSKFREHTFTEESSSILLPPTYISRRDHEDKIREIRAHTEAYRQSFFPRTIRDWNRRENR

SEQ ID NO: 3013 - protein, 777 aa, synthetic construct
  source 1..777: note = Description of Artificial Sequence: Synthetic polypeptide
  VARIANT 541: note = Any amino acid
MVSLSNYDWSHIFNNNAHDSANTFFDRFFHTFLNIFETNCPQYKCKVNPKSNSNKHRDKNPWYTAQLANMKSRLLLYRDSYRLQKTDMAKQRYSRAQKDYKHAVNEAKKQHNLVSIESSKNKCKKAWTIINSVSKSKQKVDVVISADEFNNFCIKSVNQISENIVRPHETVADLIKCHNVNYTLKDKFLLSEVTPDVVLTIVNNFRPSDSVDIYGISCNMLKKIIGYIVYPLTKCINKCLIEGVFPDVLKLSRVVPIYKKGDRNCPSSYRPISLTPILSKFVLESIIYYQLCDYLTCNNIISAVQFGFRKGKSTVHAIDSLIKKVLNAYEEKKFAQATFCDLSKAFDCVEHISLLKKLVYYGIINSEVDNIFESFLSNRKQIVCIGKQRSQLAEVKCGVPQGSVLGPLLFILMINDLPSYINTHSFSMPMIPLFSISAQTLICFKLFTILYKYSLILYADDTTFFNISSDFDMLQTVTNDTLSQASVWFRANGFLLNESKTQKIVFSLRDLPVEDFIDSVKFLGIVIDSKLSWEPHIKYIXTRLSRVVYLLRNLKNHVPAAYVRSAYFAFFQSIISYGLLIWGNSSHVQDILVLQKKVIRIITNSDKLAHCKPLFINLKILTVINLYIYTALLHIKSNLSEYQRRGDVHSHGTRNSSHLDIPYYRLSKSLNSYEVVGMKMFNKLPQEWVEAPLDLFKHKLYCWLAANPCYSLNEFYECKISWYLLGECTIISLMESFMMQCFKLYYFKYLILWKTYSDLLIFALCKVICIYALPYVK

SEQ ID NO: 3014 - protein, 1754 aa, synthetic construct
  source 1..1754: note = Description of Artificial Sequence: Synthetic polypeptide
  VARIANT 825: note = Any amino acid
  VARIANT 1543: note = Any amino acid
MAPTVQPSSVGPKGHQTHSASLKVGGPSFIAPPVPWWGGNTSPPPSGTQVPIPQPEKQQPSPAPLAREEKSVGMLPSPVSKSRLEDPSRSLGDAHTTGRRASRSSSAPETSEKPSQWSKPKEQREDKQKKKRSKKKSLPTALPPSVSQTSDSEDGLEMLASPEDLALTDLPESMDIDATSTKAAAKGDTEAGINSMFMTLMASQYANSNILQWNCGGYFHRLAELRHLLCQFPVLCVALQETWFPVQRIPALRGYRGYYKNRAAYDRVSGGVCIYVLANVPSAPVPLHTALEAVAVRIRAGQEITICSLYLPPDKAVSSAELAALVAQLPPLYLLLGDFNAHNPLWGGTEITARGRDVEYLLAQLNICLLNNGAATHFSLAHGTYSAIDLSLAVQAYFHTLLGGSMTTFVEATISLSCRSHSHHLQAACPDGHSVGQTGRLTPRLLQQRSRHTLQLGPWHLLSHRSVPCSPSLLPHLTWRVHDDLCGSDHFPLLSLPQSPPAGCLPRWSLRRANWPAYTSAATVTSPLPDDVDLAVDDVTRAIVSAAEATVPKSSGLLHRKSVPWWTPEIAEAIRERRRALQRHRRHPSLEHLIAFKRLRAQARRLIQQSKRDSWERYAATIGSRASPTZVWKQVRRLFGHRPLAGIPSLHIRGTLSTDPAAIAQYMADIMLVARHLHLTVRTSAPSKSVLNSGSFPFTCAARKNTMRHSVSGSLRVPAPFRASSTGRNPQSSHSGYSVHRPSCYRAVHGRHYARSSASASYSADFRALKERVEQRQLSFHMRRQEKYNAPFSEWEFESALAACPDTSPGPDSVHSQFVRHLPAXFQQLLLALYNHLWVKGAFPSQWRDSIIIPVMKPGADPQVAESYRPISLTNVLCKIFEHMVSRRLMWILEDRGLLAPQQGGFRHGRSAIDNLVSLESAIRTAFTRREHLVAVFFDLRKAYDTTWRHHILATLYDWGLRGPLPTFIKNFLSLRTFRVRVGTSLSTHHIQENGVPQGSVLSVPLFLVAINGLAAAVGSSVCSSLFADDFCLYYSSASIGVTERRLQGAIRKAQSWASAHGFTFSASKTRVMHFCRRVVHPDPELYLADEQLHVAETHRFLGMLFDNRLTWGPHLRQLKQKCWRHLNILRCLGHTAWGAGRQTLMHLFKALILSRLDYGSQVYDSASPSALRILDPILHGGVRLAMGAFRTSPVPSLLAEAGIPPLRFRRQQLLASYVAHVHATRLTIQIAGFCFQTPSFPLHNIDPDQVFQSRSGYVLSFPHSSPYLYLPHSPANLISLLGPSLAYSSTCNCPAIQRRRFHHIHFINSFWTSLARSVMQKSYTLMAPRSWHPSPEVSPATVVGFICRPRSCYTPHHPNRRLLFPNTVLPSPQHRPRSGLPIAVRVRTLLSSLESLPLPPAFSCQSHIPPWSIPRLQLHLQLSCDPKASVSPHTLHQQFLDILGTFRDAEVIYTDGSQVEGRVGYAYVHGDHIEQCSLLPGCTVFTAELIAIIRALDHLRTCPRKSYVICSDSLSGLQALDQCFPKHHLVRSIQDSVFSLGXSGRSVAFIWTPGHIGIPGNERADQLAKQAIASQRLDIGTPERDIRLGLHHKISMAWNSEWSTLSTPNKLCAIKPSTAAWKTSLRPSRRDSVVLCCLRIGHTWLTHGHLLHREDPPNCRCGALLTVVHILLDCPLLAALRQSFNLPSALPSLLADDASMVDRVLGFIRAAGFYHMFNGGYLTFRRPPLNSFNLLFLLSCQSYFQLAALVCTG

SEQ ID NO: 3015 - protein, 848 aa, synthetic construct
  source 1..848: note = Description of Artificial Sequence: Synthetic polypeptide
  VARIANT 183: note = Any amino acid
  VARIANT 301: note = Any amino acid
QWNKVRQLFHFKGLYISSTGFERKNIYKGTWISPDGRTVNQIDHVAIEDKLKKWITNVKTARGQSVVPITFCSKNSKGAECGSDHFLLKIDLRVGWKPKLTKKLQKVVHFDYNKLVTDEGLQDNFRINLIVLKPWQHCYRNPGNIATDSLDAGSLWEGIRDLTETAKEVIPKRMNRKKVWFDXECELAILERQRAKQVWIQSARGRYEEGKERFDEARRRTQATLRRVKRNYFKNIMVEAQKDFHGNKSKELFRKVKAIKGEGKKHGFIKDRNGRVLTNNNDIAIRWMEYFDELLNCEEPXETLEFEEPVTVDPEYPLQHSKKGTCNCGSGIPPPTFEEIKKNIKELKNGKSAGEDGIVAEMLKSGGDSCIQNIHKLVRKIWQEEVIPEDWKVALICPIHKKNDKMLCDNYRGIALLNISYKVYSKCVLLSRIKPLAEELIGEYQGGFQPGKSTTDHIFFIKQVCEKMYEYDKEIHLLFVDFQKAYDSIHRTSLFKALIEFGVSKKLVRLVSLCLDDTRAKIKLGNRTTDSFRVTTGLRQGDSLSPILFNLVLEKIIREMDSFNHQGIQVANRNITHLAYADDIVLMTHTKENLKCNANDDHGKHSKQIWTESEPHKNQIHDSWKSPTPRNPGINCGNNTYKRVKDFKYLGSIISENSSSGMEIKARIQAGSRCLHSIHNILTSRSISRALKLRLYKTLILPVILYGCQCWSTRKQELNRLAVFERRCLRKIFGPVKDNITGEWRRRHNIELEQLYSEPNIVGLMRSRRLEWAGHVVRMSEERWPRVAMEMIPTGKRPLGRPRKRWMDGIREDLQKLEAWKNWEQTAKNRNEWRALIISSRGPLGLIA

SEQ ID NO: 3016 - protein, 1416 aa, synthetic construct
  source 1..1416: note = Description of Artificial Sequence: Synthetic polypeptide
  VARIANT 355: note = Any amino acid
  VARIANT 420: note = Any amino acid
  VARIANT 424: note = Any amino acid
MAPIEKCSGTVLSSKRQKISSSSCKECEKRVMKGIMCVKCNYWLHEKCAKINLKYISDDFPWTCHACLSVETADLVSLVESKNEIIKLLQNDIEALKTEILCLKEENARLLQEKQCTVGEIHQEKQQDCANTCAREIQQTKKETRENTYARNTDVVNENISSAVDVTVNPTCKKPADKYKWKLVTYSKRKEKTTARPTQEDENEFLIIGDSLLKNVAVPNSKIDVRPGIRTQQLGKHFKNLENAKSAEPDCEPKHNYRGVFVHVGTNSLRSSSEEEIINDTRNVIRSARSVYARSKLVISGIIKRRSVSDKYISQINCAIKEQCDSLGAIFIDPNKFLCENCLGKDGLHLNRLGXVTLSRMFTDVCKIIRNEGNGKLRWTDGGDKSDILAEKANFKHHSKVKEIQNRIPEQMPQHLSQQXENYXKVLHQNIQSIGNKKLEVEILLSELQPDILCISEHGLTENQIDNLKISDYTLASYFCRSKQKSGGVSIYIKTGKLETANNKGVKLPTVKEKDFEITGVMIEGLSVFCVYRSPSGDISIFLKKICMNMKRNIIICGDINIDMGKGSKIRQDFEELLLQYHMEATISTPTRVTSHSQSVIDNIITNISRSDYESHVIQTAITDHDGQMFYLCRRHGRACETKAKIKEIRVMSEQNINTFRTILSRETWTETLQAQTVNEKYDAFIATIKFHFEVAFPKVKRQIKVQQQQQWITREVLEQRRKLQELRQVGDVEGYKTLQKTYRKTIRKAKANSINITILNSKNKIKAAWNVINTERKENAGPNKETEIRSMKIDNRIVTDGSKIANILNDNFINVVENLKLERKSPKKKGTKVTKYSYSTMFLRPVTEDELRKTIQKLKAKKSAGDDEISNHVIQLVSEQHTHTISRYSKQLFQRWNFSREIEDKVSNTLTPLVDIANSSFRDGIFPEKLKTSKVVPVYKKGNKDDPNNYRPVSLISGFSKILEMLMYNRLVDYLDKHNILVPSQHGFRMGKSTESAIASLTEYVIQCLDEKRVVAAMFLDLSKAFDTIEHDILIKKLENYGIRGLSGEWIESYLCNRKQYVSIGNSFRSETKTIKYGVPQGSVIGPLLFNLYVNDIGGEEKEKKILYADDMTVLNHGQNMQQLERSAFISANTTAQWLTENELVINLKKTMFTVFRNKEKSVQMNLKVNDMYLEEVESTKFLGVIVDNELKWKEHINYVCKKLSSVIFIMKQLSQYADKQLLCTVYHGLFEPYLQYGVTVWGNSNIQETKKIVHFTKESNQDHTKKKELGDLQCGETQTSKKRKKLFTLQKKAIRIILRRKNSETCRNCFKSLGILTFTSLYIYKTIMYITKEISLYDTNASVHTHNTRGKNEIRNIPHRLTILEKGPRYSGIKFLRNLPKNLRDNIHGNNFSRKLKDYLMEKEFYSIEEYLLN

SEQ ID NO: 3017 - protein, 939 aa, synthetic construct
  source 1..939: note = Description of Artificial Sequence: Synthetic polypeptide
  VARIANT 90: note = Any amino acid
  VARIANT 272: note = Any amino acid
  VARIANT 662: note = Any amino acid
MDLVLERPHTKYGSAIFVKSGLSIQSTGLTSENDVEILTVGFQSCTVTSVYKPPNAEFKFVEPLNFQSQPIKVVAGDFNCHSTSWGYREXDKNGEDLEAWAEQMGLVLIHDPKLPSSFNSGRWRGQYNPDNIFVSNHIAQQAKKGVLGPLPHTQHRPVTCTVAAVVKPETVPFKRRFNFKRAQWEKFSIELDKEVIKLEPSPEMYDSFIQLVRTISRRNIPRGCRTSYIPGLDKDSKSLLQKYEHLFETDPFSEETTQAGEELLNAVSATRXQKWCDMVTQLDMKQNSRKAWKLLKRLNSDPTSAPPSLVNVTPDQIAHQLLLNGKTKRRTAAKKFQRYTDEEDYLGTPFTIEELEVVFKSMKNNKAAGLDDLRPEQIKMFGPVTKQWILNLLNNCISKLQIPKIWRKAKVVALLKPGKEPTDPKHFRPVSLLCQLYKVLERLILNRISEHVDKNLINEQSGFRPGKSCCGQVLNLTQYIEDGYERGQVTGVAFIDLSAAYDTVNHKKLMRKVYSVTKDYRLTQFIQCLLQNRRFFCNSAHSSSSVCCKIGGFFVTLHNKKSRWRTLKNGLPQGSVLAPLLYNIYTNDQPISSEVRTFIYADDTATAAQGKTFEEVEMKLTAALEDLGKYYDDNHLKPNPGKTQVCAFHLRNKEARKKLKIXWRGQQLLHYDTPKYLGVKLDRSLTFKDHCQETKMKVSARNSIIRKLTGSTWGSQPSVLRTSALALCFSAAEYAAPVWRNSTHAREVDTALNETGRIVTGCLRPTPVRKIYEIMGIAPPDIRRRTAAETEKKKQETDPRHPLFGHEPRKPRLKSRRSFMSTTTSTALRPGTRRTELWQNSSNERAGENIKEEPAEGFHLPYATWKALNRLRTGVSRCKTNLRKWGFTNEDELCECGDVQDPQHLLVCRNLPNPCTIEDLHAANDVAIKTAEFWSLRSI

SEQ ID NO: 3018 - protein, 1773 aa, synthetic construct
  source 1..1773: note = Description of Artificial Sequence: Synthetic polypeptide
MKRVKLDNGRDTAVSEGRKKNNAPSYDKRTFPSLSTPWEEGQARRLGVKPFPRYLVCTRTDGGTFTATKPLFFVEHIEDKFGEVETMSKMRTGSLLIKTVSAAQSAALCACDHLGDVPVSITPHQSLNMVQGVIFHRDLLLQTDEELRANLERRGVHFVRRVQRGPKDHRVDTGAFILAFEGDTLPEKVKVMIYHCCDVKPYVPPPMRCFRCMRFGHMSSRCTAVPVCGECGRPLHEGNPCVPPPVCVNCHEHHSSRSPECPVYKKEKKIQEYKSLDRLTYQEARRKFERLHPVQLSTSYASVTSFTPPPSSSHSHPILPPPPPAPPLPPSQRPPSSSQPEKCSPSLALAGEGAPSQGSSSRRPPDRRSSASSRQPDIQADNTKVARSSSVPDLTDSSSLSGTCPSRPAREKEKEKRKKKQKSQDKAPPVVLEAPPLSSQPNNPTELVSDPLFMDVVPPSSVTDVDPALPSFVTCISPFAFHMDPRSVLIQWNCNGYYRRLLELKHLIASYSAACVVLQESHFTDGHSPTLRGFRAFCRNRVRPLQASGGVCTLVRTDVVSSWIPLRTTLEVVAVRVHLHTPLTICNLYLPPDRPPTSAALTALLQQLPPPFLILGDFNAHHLSWGSAYTTSRGRLVDQFIADHDLCLLNDGSPTHFSAAHGTFSSIDLSLTSPPPPFSLSFAGHRMTTFATVTTFRCRSRHLFLHRPFTHFSPPPLFPFFRWSPHDDLCDSDHFPLILSLPSHWTRDRIPRWVFRHADWPLYTSQVVFTPSPSDSIDEVISDVSNAITRAASIAVPQSTGPPRRRPVPWWNATIASAIRERRRALQHLKRHPSRAALVNFKRLRAKARYIIKQSKRVCWERFLSSLGSSVPLSRVWAMLRSIQGCQRPSSIPGLALPDGVCTDPLVIAEHLAAHFAKASATASYPVAFRLKKQQAEASNLCFTTHREEPYNKPFTEWELRLALSSSHDSAPGPDSIHNQLLKHLSPPQRQYLLQVFNHIWLQGVFPSQWRDSIVVPVIKPGKDPSSLDSYRPISLTNVPCKLLERMVARRLCWVLESRGLLSPYQCGFREGRSPIDHLLRLETAIRKAFSKRQHLVAVFFDLRKAYDTAWRRHILCTLHDWAYEAPYQFLSVSFYPAACSVLGLRGSLPIFISQFLSRRMFRVRVGSSFSSPQIQENGVPQGSVLSVTLFLIAINGLVSSVGSLVTPALYVDDFCIWYSSHSVASAERQLQGAIRRASTWALSHGFQFSPSKTRVMHFCRRTTVHPDPELFLGTQRLEVVAQHRFLGLLFDKKLTWLPHIRQLKISCMRKLNALRFLAHSSWGADRTTLIHIYRALIQSRLDYGCQVYGSAAPSALKLLDPVHHCGIRLATGAFRTSPVDSLLAEAGIPPLQTRRHQLLVSYAIAIRKFPGHPTYHVLFEGDGLRTPDTRPRVGLPVGLRLASLCRDFNLPSLDCMRRAIPRTPPWLVPRPQIRLDLYHAPKASVSPIIFRRLLHTVLEEFQGATIFYTDGSKFAGHTGYAFTSPIGVECHSLPESCSVFTAELTAISRALHFIKQVALDRVLICSDSMSSLQAIDRCYSSHPLVIDIHDLLADLRRTACSVAFLWVPSHVGILGNEQADQLARVAVTPCPFPWVIPGADLRVQMRSLLIQDWNTNWQATALSNKLRSIKSTTAAWSSSLRPSRRESTVLCRLRIGHSRLTHGFLLRNEPPPHCGCGALQSVAHILVECPLLLALRAKYGIPHSLPSVLANDSRIADRVLGFIRESGFYSRL

SEQ ID NO: 3019 - protein, 969 aa, synthetic construct
  source 1..969: note = Description of Artificial Sequence: Synthetic polypeptide
MDNYRILKGRPAIKVKKTEKTKNVVLILGTAFFIHNSITESIVEFRSPSPRLPVVTLASGNKLYTIFNAHAPINEDNRKNPEKVEEFWSQLEEELFRTPDKHVKILMGDFNAQIGKERKFRNIVGKYVAHRRTNRNGERLIDVCESFGMKIMSTQFKRAPKQMKTWRSPNPMLGEFQIDHVATTSPKEIMNVRVQKGANFDSDHYLTRVKVKPIPGNRRRKTPRIQKYRIEELKISEEIVVKYQHELDTLNSNEWDKMAQKIQEAAKQTIFLAKKKKHPWWDDECEDALRKRSEAWNKWNSTKQNFEEFKTQRRTTAKVFRNAKRKFERDQLKELEENFQKNNTRSFYQTFKSKLRGYSSPNICLKMIRANRLLITQHLFKNDQGKLIMNNKHNCEHLARYFKELLNCDPPPEKLTFQKPQNKLPDSTPPDKKEIREIIRGLKNNKVSGKDSIVAELLKYAGDSFLERLERLFQKIWLTGEIPEEWRDAVIHPLHKKGDKSNVNNYRGISLLPVAYKILAIALKHRIEQHIDQQLGEYQAGFRTGRSCAEQIFTIKTLIKTKALAADKKVIMTFVDFKKAYDSVDRDTLIEVLKEFGIDDKTTRLIQQTLTNTRSQIKFLGELSEPFEIKTGLRQGDSLSPILFNCVLEKVIREWRKEMSQFNFPNGIRLGRKQSGLTFECLAFADDIVFFAENLQIATKQIEVLKETAVKAGLQISFEKTQYMNINATDPVWTMRTKYGDIKRVQRFKYLGEILTPNNNEKAAIEERARKMEIAFRLCQNTYKSKSLSYQAKFRHYSSVVKPECLYASETIARKGLSDLEKKERKFLRKILGPRKISNEFTFRLRSNQELYQRFENITTTMKKRRLSFYGHIKRMKSERLANKILLFQENRKTQVPWVKEVHRDLEKCGITAEEIVNRQIFRKKVAEVKDFFEEKTRKNRVFSAEERARVSQRMKEYWRKRKEENFRK

SEQ ID NO: 3020 - protein, 981 aa, synthetic construct
  source 1..981: note = Description of Artificial Sequence: Synthetic polypeptide
  VARIANT 355: note = Any amino acid
  VARIANT 557: note = Any amino acid
MMKGPFSEPCLTAISLNIEGLSTEKEQLISNTCKLHSCDVLCLQETHRGPSQRRPRIPGMILVKECPHDQYGSALFIRPGIKVSNIRFNTVNNTEIISVIIGSITVSSIYKPPGERFAFSQHVCHPQLVMGDFNCHSKVWGYQDTNEDGELLESWAEEQELNLIHDQKQPASFNSARWKRGYNPDLIFVSKTLSGSCNKFVLNPIPKTQHRPIMVKFRPVIVPQEVSFKRRFNFKRANWKKFADILDKEIVYLPPNAENYEKFVEAVKRSARLSIPRGCRTLYIPGISNKMKQLYNEYIEQYNHDPFSVETIKLGEQLTETISKDRQESWKHMLESLDMKHSSRRAWNLLKRLSXDPAAPKDQVSVTANQIAHQLLLNGKPTRNSKIVTSYKRPQVDEIPPVPYFTSIELETAISSLKSRKAPGPDDVVNEFIQNIGPIAKEWLLQLYNFCWANKSVPKLWLKAKVVAVPKPGKSRDDAKNYRPISLLCCPFKLYERLILNKIGPQLESQIIPQQAGFRPGKSCTGQVLCLTQYIEDGFQKGEKTGVVFVDLSAAYXTINHKILLENFSKKIFQNEGNYHLTEVVRSLISNRRYYVEFQEQRSRWRNQKNGLPQGSVLSPLLFNLYTNDQPAGPDARSFIYADDVAIACQSRSISHIERNLSDALEVLTEYYNRNQLRPNPAKTQTCLFHLNNQEAKRELQLEWNSVKLKHCPNPVYLGVTLDRTLSYKSHVEKTRAKIYTRNGIIRKLTNSHWGANPEILRSSSLALCFAPAEYACPVWRRSTHAHKLDTALNDSCRLITGCLKPTNRDLLYMCSGIAPPQIRRQTWRWLKEADSARIEDIPCSDISQWCKIKIEERFHFEHPLNESQSTTRESMWTQKLEKKKKKNSLQCWNIKEKLPAGSQLEWRVWKSLNRLRCRMGRSKDNLFKWGYAEDELCQCGEKQTMTHLLSCPSLPAPCTFQDLWLANDAAVKCAEHWREI

SEQ ID NO: 3021 - protein, 1210 aa, synthetic construct
  source 1..1210: note = Description of Artificial Sequence: Synthetic polypeptide
  VARIANT 85: note = Any amino acid
MPRKFFRPKMFTHGKPHETVLQVPPNNRFSVFEENTNTVDSFATVLNNERVSANTSRKIGKKCVKVNIHADSHGRGLAKILCEDXDVDAYSYVKPGAPLYEIGKNIKDGSPMNSNEYTVIVGGANDVYKNELSSAIQNLNIILESNNSNAMIILGIPHRHDLIYESCVNKEIAKANKQFENICNLYPNTQFLPIDFLQRDSFTRHGLHLSRKGKKLLCFKIAEMVSANTKKGSNSQKTVQTSVPQQPTQSPSAQLYNINATTKTPTDDPILPESTNSPPSVDSIEPTSVAAMPGLIVDTTVTPASHQEEDIWASRIVPEPMEEASSTPEDSSQLLKIQGFFMVSSQGRKNSVIATPPSKPNVNTKREINPINHPKTLVSVNKLTVFHQNIQGLRSKLDEISINILDKDCIDSADVICFSEHFMKLDTDSLQLDSYNLAALYCRQSLEKGGVVIYVKNKIVHRSLDLSDYCIDQHCEVCGVVISTNLSEITVLSCYKAPAGKICIFLKQIVSVNSYFLQKQRILLIFFAKTKNIIVLGDFNVDYLIDNMGKNDLSHVMSSFNLTAQVDFPTRVTANSISRMTISSPNDNIFLDKSRNPNTIVKRVLNGLSDHDGQLLSIEGVGPLSKNKSYSKTFRAINSQSINTFCDLLQETDWDQIEHLDNVDDKYNAFLNEFICLFEAAFPKRTAKPKHETYCHKNWLTRGIKTSCRRKRNLYASLKSCFSLEKEKHYKLYCSILKKVIRAKSNSIKSEIDVSSNKIKTIWGIIKRETGKIPITENSLEIKKMMSFMIMLKKNDVIHDNVEIITDIFNSHFLSSAAQTGKTCSINEAMLFLQKSIKKQSKLTCLLSQCMKLRLKTKQINMSPVTVHEIEVIIKEMKSKNSVGIDGISSRILKHCYKPVSKILCHIFNKSIQQGIVPERLKYAIVKPLFKKGDKTDVTNYRPISLLTIFSKILEKLVHKRFIDHLTQYKLLNSSQFGFQKGISTDQAIFSFTNQILESFNNKLSPVGIFCDLSKAFDSVNHEILLEKAKHYGFIGSAGKWIKSYLTGRKQKVMLNNSEGHSVSSSWGSIGCGVPQGSVLGPLLFLIFINDLPLCTSLKTHFTLFADDTSILINESSNYNLEESANIVLREALNWFVINGLALNANKTQIIHFQPSKKMEDPITIKCNGTDLLQAESTKFLGIHIDSNLKWSEHILQLHKKLSSATFAIR

SEQ ID NO: 3022 - protein, 769 aa, synthetic construct
  source 1..769: note = Description of Artificial Sequence: Synthetic polypeptide
SNRAKNICAQASKALLRERIRHIRSSLDSSNRKLIELHLALSSKLAEEDWEKVDRLTFQQAERTNDSVATRQMKKFDNLQQKTTGNGQTMDTQRTVVNLSSHELSDAATQILSKGMNFAITPRRVPKEDIIESVEASLRHLPQAEAEKIRQETVRVLAHAKPPKQNISNEERRAIIELKNNPDLVVVQSDKGNATVVMNTTDYDDRMEKLLSEPIYKKLKGDPTAKVIKQTQALLKKTRMNFDTARRLNPQVPQAPRIYGVPKIHRESFPLRPIVCSIDSPTYRLAKELVPKLQHLVGHTDSYVKDSTHFVALLEEKRISTTDLMVSFDVKSLFTNVPVSDTMNILEERVPPDVCDLVQHCLTTTYFRWKGEFYEQTDGVAMGSPLSPVAADIFMEAFEETALQSAPLRPDCWLRYVDDTFVIWPHGEEELQNFHQHLNQQHNKIQFTMEIEKNGVLPFLDVEVYRKPEGKLGHRVYRKATSTGRYLHATSHHHPTQKKSVLHTLTKRAHRISDEQHLKAELQNIRSIFEANGYGKRMIEQTMTSNDGNKREEQKEEQTIALLPYVKGVTERVGKILRREGIKPIFRSNNKIRDVLGSMKDKTDKLHTAGVYEIGCECGQVYIGETGRPINTRIAEHERYIRLGQHTKSAVAEHQEECGKQIGFQEVTVLAKQPYTLKRKIREAIEIAKRPGNMNREDGYRLPASWLPAVAALRDDTARSAVHRGPHSPETTAAARTQSKQHALAGARHQCYVTATTAPHSPVSTNGKH

SEQ ID NO: 3023 - protein, 1361 aa, synthetic construct
  source 1..1361: note = Description of Artificial Sequence: Synthetic polypeptide
MARNCDCCERMEAELVTLRSQLQAALASLATLETAVGGRRCCGPLAGVQQTPCASVVPSDRPAAVASPLTAREGVAPQSVVDWEVSSARVRRRKTSRGTEVEASPVSLANRFEALSVAEDVPDADGVACPVLAPLPSRSGHSQRVGLLVVGSSNVRRVMEPLRKMAAREGKKSNVHSVCIPGGVIPDVERVLPDAMKSTGCSQLQVVAHVGTNDVCRFGSEEILSGFERLSEVVKTASLACKMKAELTICSIVDRTDCGPLVQSRVEGLNQRLRRFCDRVGCRFLDLRQRVVGFRVPLNRSGVHYTQEAATRVAGAVWRGLGGFLGVRSPLYSGSGYTGSGGCVAWTGRFFRLEGLGNTQNGFQSQRGQVRHRKKADLGTIGVTVVNCRSCVGKVPELQALIESTEAQIVIGSESWLTPEISSAEIFSKGQMVFRKDRINKKGGGVFIAVTNGLSCSEIEADTSCELVWVEVIPDNRNKLIIGSFYRPPDSDDAVAEMFKESLNHISNRYPKHTVIIGGDFNLPSICWHNYVFKTGGKYKTSSELVLNAFSENYFEQLVHEPTRIVSGCENTLDLLATNNPEIVKSIKTDTGISEHRVVVARLNVEIPKCTKNKRKIYLFNKADKNSLHAFLSDSLQSFKTKNASVDQLWLTFKDIISVAIERFIPNKLIKEGADPPWYTKQVRSLLQKQRKTHAKFKKTQNPQDWQSFTETRNLARTSMREAYSSYHNEILSRNLAENPKKFWSYVKYTSGKTQTIPSLRDSNGNTTDDSTAKAELLNTAFRNSFTKEDEVNTPVFNPRTAASMRNLEVDVPGVVKQLKSLNKNKSSGPDCIPTRFLSEYADAIAPYLAIIYNRSLSERSVPKDWKVAQVTPIFKKGNRSDPQNYRPSHSPKLQAISLTSICSRILEHILCSNIMNYLEENDLLTNSQHGFRKYRSCETQLALYSHEVLSAIDKGSQIDSIFLDFRKAFDTVPHKRLLMKLRAYGISPQLCDWIHDFLSERTQFVVIDGKSSSKTEVISGVPREALNRSDIWRSQGSVIGPLLFLVFINDLGDNLNSSLRLFADDAVVYRLVKSTEDQKQLQSDLDKISTWCENWQLTLNKEKCEVIHMTTKRNPLNFNYAINQSNLKVVNSTKYLGVTITNNLTGENTGRKFYQIPRSYNYEQLDWREHIENIVGKANQRLRFIGRTLRRCTSSTKETAYITLVRPLLEYCCPLWDPHQVGLTEDIEKVQRRAARFVLSRYGGEASRKCCTNWGGNHEGSEKGSSFCFITLRGGSVTEMLHELGWKSLKERRYSLRRDLFAKFQSPTFTSECENILLAPTYLGRHDHPNKIREIRSKTERFRCSFFPRAIREWNGREKL

SEQ ID NO: 3024 - protein, 981 aa, synthetic construct
  source 1..981: note = Description of Artificial Sequence: Synthetic polypeptide
  VARIANT 428: note = Any amino acid
EQQCMPQGTCSDDQACPHKSWSVKSQPSFLTTGMNLCNYKPVQRLEVKDCGSMSFFHLNIQSVRNKLPELELFLLEFQCDILCLMSTGHTLSNEHWLKEHEHNMYTPLGYKFLTGFFRSNIEKGGVSILMKNDLNCKIRIVDLKHLASEGQIEIAAIHLPPSADTLKSHNFSCLNDKPTRQNACLDNVISNLSRDDVNLNVVKPMLSDHDGILLKLIVPKKDHRPTQPIVNRPVRQLKPINITNLTQRLLTFDWDATVMENTTLNNAFDYPPQLIIMLLIIRPNLFNEYCPPPPSTKVKYKEETKEKLTMVHPHLNSLRILLKIYYEKSCTDSEYRHSYNKLKNIYKKDIISAKKEANGTYISQATNKCQAAWKIIKAEAGLQVVNPPIPRADELNKNFINSGQSAIDHSNLDDNADSFLSSLETELXVDKLKFRWHAIYPKDILDVARSLSNSRTEDIYGLSNFTIKRIIEAICIPLCQLINRMFLEGTYPDCLKQTIVLPIYKKGDRTSPQNYRPIAIVPITSKIIETIMKNQLNDFFCNSLLNKAQYGFRSGLSTVKAVQEVVHSVLHGFENRQHSYATLVDLSKAFDTVSHGILTKKLETYGITEKELALLKSYLANRNQMVLVNSTNKSDPLKVQYGVPQGSVLGPFLFIVYVNDLPNLLPFKSVMYADDTTFITSHNDVNAVKQMNNSMMEKATQWFQENRLTLNNNKTEHILFSLGNINNEQNHPVKLLGIYLDSKLCWNTHTEKLCSKLARVLYLLRKLKDCVSKELMLMAYYAFFHAPYIMEYFFGETPLERKKSSSGKRKPSDAFLARTHAYGILCFFPCTLHYGILLWGNSAGAKEVFLWQKKAIRCIFGLSKLTSCKQYFVQHKILTVPSLYVLKALMHARQNVDEYESRSDVHLYGTRNRNLLDIPWARLSKVKNSFLHMAKIFFNKLPYNIRELHENKFKIVIETWLKEKALYNTNEFIWTENKSCY

SEQ ID NO: 3025 - protein, 555 aa, synthetic construct
  source 1..555: note = Description of Artificial Sequence: Synthetic polypeptide
  VARIANT 315: note = Any amino acid
KLLLNAVIQLLRKGLHYEIPRESGIVVLKADKGNSTVLLPRRLYLEKMYGLLSDTMYRKIEHDPTARVQRKTCTLLNSSSLAPETSSGPYSTCATEDVHTFEFFLVSSRDIKRLRPHGSVPPRLYGLPKVHKEGIPLRPIVSNIDAPTYDLAKHLASLLRPLVGKCTHHIRNSADFINRLGALHLSSSDLLVSFDVVSLFTKVPLADSLALIGKRFQSDITGLFRHALSSTYFMFNQEYFEQTDGVAMGSPLSPLVANFFMEDFEERALESAVCKPTVFWRYVDDTFIVWPHGEDKLMEFLHHLNSIHENIRFTXELEKDGCLPFLDVLVKRKSDGSVGHSVYRKPTHTDSYLHSSSCHHPSQTMSVLKTLVHRAHTVSDAESLPKELAHLRTVFRDNGYSTRQINRAFSPKTRNREVDKEENAPAKSLAFLPFVGNVSFKIGRILNNYQVKVIFRPPSKISTCWDQDFDLLGSVKDDLLLRKAGIYKIPCECGMAYIGQTTRTWKNVAQNINVALAFCNPASLQLRSIVFPTDIQWSMIKHQFWPQQHPSGTPL

SEQ ID NO: 3026 - protein, 487 aa, synthetic construct
  source 1..487: note = Description of Artificial Sequence: Synthetic polypeptide
VLCHIFKLFEKVLHDRLSKAIDNYLIPQQAGFRPGKSTTSQVINLTQLLEDGYENRKITGVAFIDLTAAYDTVNLRLLMKKLYAITRDFKFTSIIRSLLQNRRFSVEFQGKQSRWRAQKNGLPQGSVLAPLLFNIYTNDQPLPAGTENYIYADDRAMAVQGDSFEEVEKRLTDALDALCQYYADSQLKPNPSKTQVCAFHLRNKQANRKLRVSWKDTPLEHCANPKYLGVTLDRALTYKQHCINTKMKVSGRNNILRKITNSSWGAKPEVVRTTALTVCFSAGEYASSVWYNSAHAKQVDIALNETCRLVTGCLKPTPIDKLYHLAGIAPPAVRREAAAYSERARAELSESHLLHNIQPATRRLKSRRSFLRATDNLSDQPGSRVDRWKRSRERHWMEPKEELAPGHNEDWTVWKSLNRLRTNTARSRDNLMKWGYSTVSNLCDCGDVQTTQHMYNCPECPSHCTLEDLMLATPNAVDVARFWAKCI

SEQ ID NO: 3027 - protein, 937 aa, synthetic construct
  source 1..937: note = Description of Artificial Sequence: Synthetic polypeptide
MDRRKVKILGLSETKWKGSGKKTLRNGYILHWCGSQTETRNGVALLLHKDVAIHTDIRYVSDRIIQMKLHVDNTYITIFQVYAPQTGCTADEKEQFLENLEDLIVEDNVIIMGDLNAQVGKERQGCENIIGPHGYGKRNPEGEQLLDLCVRNKLIIKNTWYQKRESHKITRYSWDGQHKTVIDYIITDQKASQTVKVIPSECMDSDHRLLTADLKNVRVPLVKYKKMPKIKTWLLRDPEKKQEYQKKIKDRIPKTEKLGVEEEWKLFKDTLVTEAVHICGKTSAAQREKETPWWNDRVKTAIKERNVLKKKLDREKQNRVDVRNDTEIERLSQEYRNKKLAVKRLIQNEKDKCWDDFTTKLQEDCQGNKKLLYKLVNDKRYERTNIVVLETEEGKLLRTESEIRSEMRNHFNSLLNGNVDSSDDSDCPAEETPEVLQPLTWLEVESALRNMRNGKSPGFDELSSDMMKAAGTPGLQWIYRVLSVIWTNNKIPDDWTKGIIIPLFKKGDRKKCGNYRGITLLSHTLKLLEKIIETRLRKIVEPLLEEEQHGFRKGRSTIDLIFAVRILAEKYWEHGKNLVMVFLDLEKAYDSVPRNKIWKCLEDLKVPNYLIDRVKMLYQTCNSSVQIGNGRSEWFETKRGVQQGSALSPLLFIIVMDRMLKSIKETANESRSLVFADDVVIWGETEKEVQKSLTVWNNKFKEFNLKISKTKTVEMTINREGTSSNIYLEGTKIKSVSHFQYLGSIFSKDNTIRQEILNRTQKASNFYMQVRNLLWDKKVPQAAKLTLYNTYFTPILIYGMETCTLLKKDYSRIQATEMRFIRTMNQSTRRDKIRNEVHRETAGIRVPIANILGKRRLQWYGHVMRMDSTRTAKKYFRMEVGGRRPRGRPRRRWIEAVKSDIEKNGFNWDDVQDQMLYQDRMRWRALVSHTRETGDGK

SEQ ID NO: 3028 - protein, 512 aa, synthetic construct
  source 1..512: note = Description of Artificial Sequence: Synthetic polypeptide
  VARIANT 393: note = Any amino acid
MGIPLRPIVSTIGAPTYQLAKHLTSVLSPQVGKCEHHIKNSAQFVERIRQLRLSNSDLMVSFDVVSLFTRVPLKESLELIEKKFGPSFTKVFNFVLTSTYFLFDGEYYEQTDGVPMGSPLSPVIANMYMEEFEDKALNTAPLKPTIFYRYVDDTFVIWPHGEDELQVFLQHLNSIHSQIQFTMEVEQNGQLPFLDVLVRRKPDGTLGHSVYRKETHTDQYLHASSCHHPSQREGVLTTLVHRARVISDEESLKPELDHLKEVFQENGYSDRQIRRAFKHKSTPQPTPEEDPPAKIAYIPYAGNVSGKIGRILRRQNIKCVYRPPAKIKSLLGTVKDDLGLRKSGVYHIPCECGKAYIGQTIRTIEERCTEHKRHTELQQPTKSAIAEHCLETXHKMKYEDTEVLHNTSRYWDCLYKEAIEIRLRENLINKDSGFQLSHAWNPALKFLRSRRKQNTEHSEGRAQTEVRHSSPEQELPPPPQHPGVRTRGQWRGVTAGIYSTAAGPAPQSAGVT

SEQ ID NO: 3029 - protein, 628 aa, synthetic construct
  source 1..628: note = Description of Artificial Sequence: Synthetic polypeptide
MSGTKSAEEKTCRRIRNKLKNEGALITKADKGTPWSGCPHHKGRQGNTMVIMKQDDYRNKTLTFIEDNNIHKLTSDPTQRFHKNTQTLLKSITHIFPKQKIKWLKQKNPKAPTLNCLPKIHKEHIPVRPVVNFRNAPTYYLAREIHSYLQKHYVFTNNRSILNTSELIQKIKHIIIPSTATLTSFDITSMYTNIPITETINIIKQQLQQQTDTPKSHIKETTNILKLITEQNYFTFDNQFYSQEDGLPMGSPVSGLLANIFLNHIENKIFDTIVKPKQYKIIYWHRYVDDIICLLDETPSRIQELHNDINNVHPKIKFTIETENDRRLNFLDLSIHRDKNQHKFSIYRKPTTTSTAIHKHSNNPITQKQAGFQYMLHRLNKTPLSDEQYKNELQTIKQIATENGYDTNIIDKLNHKIKAKLKGTTNTQKQTDQKHNTSTQNINPLNSHTPNTHTQEQKSNKTTNKWHTLTYDNKATHRIGNILKKQGLKVAYRTDNSIQRKLKTTNTNTDKHNTSGIYQLTCQDCNSVYIGQTCRNFNTRYTEHRRALKSNSHSTFAEHLINMNHKPTDINTDLKILKHSKSLPQKLTIEENYHIQKAIIERKEIINEYTALCNGTIFSALKELTENP

SEQ ID NO: 3030 - protein, 984 aa, synthetic construct
  source 1..984: note = Description of Artificial Sequence: Synthetic polypeptide
  VARIANT 97: note = Any amino acid
  VARIANT 174: note = Any amino acid
  VARIANT 220: note = Any amino acid
  VARIANT 305: note = Any amino acid
  VARIANT 403: note = Any amino acid
MMASSLKGSTTPGGNQSTIVKDNVSEPTDSGELTPTCKRLKSKKVSYFATFNVNSLLKIGKLKHLTDTLTNQNIAITALQETRYTDEAAFESEGFRXLKGKPGKRVMKNVPQLGTGFIINRQILGAITDFSSKSSRLSTLTFRGANKMYTMVNVHAPTNETNKTDPEKVEEFWXDLEETLSKIPTKNVIILLGDFNAQLGKERKYRNIIGNYPAHNRTNXNGERLVEICKTFDLIMKSTAFKRLPRKQMTWVCQILCKTDDMGMPNPLLGEFQLDHVAIPKRAGKEIQNVKVLRGANLDSDHFLXKIKIKIIPKVHQPRNTIRTVKYDTGKLKTSTDFKTSLSQKDYQGWEQLKDAAIEKRRKAWADWCSHKTLENLNKFQEVRKNTAKTIRNLKRKYEQARXTQIEEDFQKNNTRDFYRTFKTNLNRYDPPTLSFKNKEGKIVYGEMENSQILAEYFEELLNCEAPADTFSYNDTEPNPDSEPPTTEEIKNIINTLKNNKAPGEDGIIAELFKYANENVIIELKQIISKIWEEEKLPEGWTSALVHPIHKKRRYIPFTKKGDKTDPGNYRGISLIPVAYKVFSKALLNRVEKQLNPQIDEYQGGFRKGRSCAEQILNLKMIMAYQKQRCKKFVLTFVDFKKAYDSVDRQTLFQILKEMKLDRKSSELVRQTLNNTTSKVKFRGKLSESFKINTGVRQGDGLSPMLFNCVLDKVIREWRQGMKGVGGIRLGCKKKGIRVDCLAFADDIVLLSESLEEAVNQTKELQRQAAKTGLQISIEKTKYMTNITEAPGWMAIDRGKIQKVEKFKYLGEWIDTGLTEKDAMEARINKINLAYKLTMNIYNKKNISINAKLKHYQTVIRPEALYAAETLNLIRTGVIKRLELVERKILRRILGPRRTEDGQFRNRSNQELYSKIEKISNIIKKRRCEFFGHICRMDQGRLTQQISQFLLYKKSKIRWIQEVQRDLEEMGIRDQEIHNRVIFK

SEQ ID NO: 3031 - protein, 1084 aa, synthetic construct
  source 1..1084: note = Description of Artificial Sequence: Synthetic polypeptide
  VARIANT 852: note = Any amino acid
MSQSPVASSVAVVGNKAAVTVPLREDSPVASSVAAVGNKAAVPVTVPPQZASTATASTAPPNEEAAEKKKRSSREEEVVSSVAGRRKMVPPLRLKDFLVEGSKMKNLEISDLKHPIAPHQNVHSKGNSSSELKFATNLLPEHQGIKDKEFFVNDFGLDNNFDIFCFSEHWATENELTLVLDTYNIANSYCRKLHLRGGVAIYTNQSLSYSFTKLDLDYLCEEQNFEAAGIFIVSLKLVIISLYRSPKGIISVFLEKLEMLLNVFRESKWLHYDIVIGGDLNADFDVTTNKGVSLNCNDKQRSVTELKNLLRQHNLHSINSRPTRDKACLDNIFVNFKTAEDSCMNCRRLMYVTVFPFSDHDAVSVNYISRFHPDKCDIPVPKVVITRPITDDKISRFRMALADREWFDQCYGDTHCSLSSDLSAKVVFDRFFKTFLTLFNDSIPLKNAKQHSPKKCKVIDKGFKTKVTNRQNPWYTEQLTNLKHQLMVLYNISNALKTEHARSAYVKCRNEYKKAIVEAKKAHNFRSIENSTNKCQAAWKLINSVAKDPRNKSVNVSPQKFNDYFIKSVEEVGNAIIKPDIRSSELLSKNVSRSTTNINVFTFSEVSPSLILKIVKQLKSSDSADIYDISCNMLKRVIDCIVYPLTFCINKCISEGYFPDELKVSRVVPVYKKGDTESPSSYRPISIVPAFSKVLECVIYQQLSVYFENLGLISESQYGFRKNLSTVDAIDSVVKYLHQVFEDKGFAQVTFCDLSKAFDCVEHTPLLDKLEFYGIRDISLKLLKSYLQNRRQVVCIGKEMSSTEQVKVGVPQGSVLGPFLFLIMINDLPSFIKSSTVLYADDTTFLHSSNDXSSLKTCVAKTLDQASYWFKANGFLLNETKTQQMVFTLKDKLPSDDPSYVKFLGVYLDDKLSWGQHVKYISGKLSRVIYLLRRLMDYVPEKYVRITYFSFFQSIITYGIILWGNSSCVQDILILQKKAIRVITGSPHKEHCKPLFCKLKVMTVINLYIYYVLIYTKRKLPETKLRENVHYYNTRRNKCIFTSYHRLSKSLNSYELVGINYLISCHNMYKIYPNKHLNKRCMTG

SEQ ID NO: 3032 - protein, 752 aa, synthetic construct
  source 1..752: note = Description of Artificial Sequence: Synthetic polypeptide
MQAIAEDKRSRWCNLVENLEEITVVQSCREPRMKQNSMEIIKKLEWDPTDHKQKNNGVTANQIASQLLKNGKTGGKKKGKELYPKNKKMMASSIHIHSNRTGRRHSEYETEWPPQYTFTATELEDAIQSMKLNKAAGTDDLRTEQIKHFGPKVRNWLLQMINACIKIPKLWRQARVVALLKPGKEIRILKVTDQCHFYAISTRCWSGDPKTMAAGEGGGLTKTWQGDTDPKSYRPVSLLCHLYKMLERMILNRVAQIIDGKIIKEQAGFRPGRSCCGQILNLTQHIEDGFERKLITGAAFIDLTAAYDTVNHRKLLCKLYHLTGDCRLTMVIGSLLQNRRFYVSLNGKNSRWRLQKNGLPQGSVLSPILYNVYTNDQPIPQDTRLFVYADDTAVAVQGSSFDEVSQKHPVVLKNLLNTTMPITSIPKTSSGLEELAQYYDANHLKPNPCKTQVCAFHLRNRDAGVDLDVTWQGKKLDTVQHLNTLGYTIPWGTLDRTLSFKQHCRNTKAKVCSRNNIIRRLTNYEWGAQPSVLRTSALALCVSAAEYAAPVWDASAHTKQVDVSVNETMRIVTGCLRPTPTGNMYLLAGIAPPRIRRQVAADAERTKKENDYRHPLNGHVTQARRLKSRNSFIARTKILDGSQEDNRVCKWKNEQTGLPITPKEEMAPGNKLPYTVWRTLNRMRAGVPRCKTNLRRWGLLTNDDDALCECGEVQDEAHLLTCRLLPEPCSFSDLLQANDKAVAVANYWKNKT

SEQ ID NO: 3033 - protein, 1900 aa, synthetic construct
  source 1..1900: note = Description of Artificial Sequence: Synthetic polypeptide
  VARIANT 14: note = Any amino acid
  VARIANT 50: note = Any amino acid
  VARIANT 90: note = Any amino acid
  VARIANT 92: note = Any amino acid
  VARIANT 94: note = Any amino acid
  VARIANT 121: note = Any amino acid
  VARIANT 170: note = Any amino acid
  VARIANT 249: note = Any amino acid
  VARIANT 261: note = Any amino acid
  VARIANT 286: note = Any amino acid
  VARIANT 315: note = Any amino acid
  VARIANT 353: note = Any amino acid
  VARIANT 357: note = Ile or Leu
  VARIANT 386: note = Any amino acid
  VARIANT 399: note = Any amino acid
  VARIANT 403: note = Any amino acid
  VARIANT 427: note = Any amino acid
  VARIANT 458: note = Any amino acid
  VARIANT 481: note = Any amino acid
  VARIANT 526: note = Any amino acid
  VARIANT 556: note = Any amino acid
  VARIANT 1300: note = Any amino acid
MALPGAKPASLSVXGPNLMLRHMTPRRSLPWPRHGRNAGREIEVRLMPPXTWYVPGLTANRLPPRSPCFLWKTLRISSGRWMACQDEIWXCXHXDVVPSPVTGTACLVRGGGWHVKMRSGXVLITTSSPAQSRALLACDKLGDVPVSITPHKSLNMVQGIIFHKDLLLQXDDELRKNLERRGVHFIRRVHRGPKDNRVATGAFILAFEGDSLPEKVKVMIYRCDVKPYVPPPMRCFKCWRFGHMSSRCXGNPTCRECGRAXHPDAPCAPPPVCVNCGQHHSPCSPXCTVLHKERKIMEYKTLDRLSYSEAKRKYXKLHPVSMKTSMPQLHHTASAISATALHCLVFHSGPPGXTAHXCPHGLWGHLNLHRPQGPCFGSTTISTVGXSVPTPEPESQQPXLAPXARKGSLGSLPSKASPADASGWLKXPPTAGRRASRASSVPGDGSAEPSQHEKPKEXREKKKKKNKSKTKDSLVATVPPXHSTSSSEDEIEILASPKDLAIAESSEAMDVEALPQKSATAEDTVXPTAPSKSACPSDQEALGSASKIGDSRRYCXPYCAVEISMSQRPGGSLILQWNCGGFFRHLPELQQLLCRFPAFCVALQETWFPAQRTPALRGYRGYYKNRTIYDRVSGGVCIYVLATVPSAAVPLHTTLEAVAVRIRAMQELTICSLYLPPDEMVSLTDLAALVAQLPPPFLLLGDFNAHHPLWGGAQTTGRGRDIETLLSQQDICLLNTGAPTHFCVARGTYSAIDLSVCTPSLLPHLSWGGSTMTFAGVTISPFFCHSSTWTSGSHPMVSIAADWRGYTSAAVVSVPLPPDIDTAVQQVTAAIVSAAEETVPITTGSPRRKVVPWWTPEIAEAIRDRRRRCNATGAAPQSKIGHPGPSAALQRHRRRPTIENLIAFKRLRARARRLIRQSKQDCWERYVASIGSRASPSRVWSQVRRLFGYRPPAGIPSLTVDGTLCTDPAVIAECMAEHYASCSATANYSASFRSLKQRVERNPLSFHTRRRELYNARLRSGSLTLLSLHAPIPLRDQTAYTASSSVTCQRTFITNCSPYLIGSGQGVFSHPSGGIVLLSLSTTGGAKSSIFPHSPPGTVQCSFTEWEFNTALAACPDTSPGPDRIHGQFVRHLSADFHHKLLALFNRVWTGGVFPSQWRDSIIIPVMKPGADPLAVDSYRPISLTNVLCKLLERMVSRRLMWILEDRSLLAPQQGGFRQGRSTIDNLVSLESAIRTAFSRCEHLVAVFFDLRRAYDTTWRHHILATLYDWGLRGPLPIFIKNFLSLRTFRVRVGTSLSSXRVLENGVPQGSVLSVPLFLIAINGLAAAVGSSVCCSLFADDFCLYYSSPSIGVAERRLQGAIRRAQSWATAHGFTFSASKTRVMHFCRRRAVHPDPELYLAADQLHVAETHRFLGVLFDNRLTWGPHLRQLKQKCWRHLNILRCLSHTAWGADRRTLMHLFKALIQSRLDYGSQVYDSASPSALRILDPILHGGVRLATGAFRTSPVPSLLAEAGIPPLRYRRQQLLASYIAHVHATPHHPNRRLLFPNTDLPSPQRRPRSGLPVAVRVHSLLSSLESFPLRPAFSCLSHIPPWTIPRLQLHLQLSCDPKASVSPQLLRHQFLDILGTFRDADVIYTDGSQVDGRVGYAYVHGDHTEQRSLPPGCTVFTAELIAITRALDHLRACPRKSYLICSDSLSALHALDQCFPKHHLVRSIQVTVFSLGKSGRSVAFIWTPGHIGIPGNERADQLAKQAIACQRLDIGTPEGDIRLGLHRKIFEAWNSEWATMSTPNKLRAIKPSTAAWKTSLRPSRRDSVVLCRLRIGHTWLTHGHLLRREEPPECRCGALLTVVHILLDCPLLAALRQSFNLPTALPSILADDASMADCVLGFIRAAGFYHKI

SEQ ID NO: 3034 - protein, 757 aa, synthetic construct
  source 1..757: note = Description of Artificial Sequence: Synthetic polypeptide
MGLPFKLNAGGNALKLGETVVNLSSRKLSPLEERVLDRGLTFIPTSKTLSHEPILSSVEHVNRTFKLNFFFRNRLGRGKRIPFIEKSGWTPPDSAIDSDILATCDKLHEEISHLPLVNEKHNLTKFERKALNSLKNDQNIIIRKSDKGSCCVIQNREDYIFELEKQLNNANHYRVLDQPIFMETAQKINNILKTLVNKQFISDSQYDYLSAKPEVRQRHIYTLPKIHKNPETEWSLANRIPKGRPIISDCASESYRVSEYIDHFLLPLACKHPSYLKDTTDFVEKIKSLNVPPNARFISLDVTSMYTNIDNKTGLDAVRKAFLRNPCVDRPDKEILELLELCLTRNDFAFNEKIYLQTSGTAMGKRFAPSYANIFMAEWELEISSISPFEPFFYGRFLDDIFIIWTESLTNFWQYFEILNNHHPSVKLTANISEQSMDFLDTTVFKGPSFSQTNKLDIKVFFKPTDTHQLLYKNSFHPKHTFTGIIKSQILRFFRICTQKVDFDAACRLVFSKLRERGYSKRFLRKIKNDTVLDLLKINEPPPPINNFGAIPCRGSRCRTCEHIHMSHYFQNKKNGKIFEIKERLTCTDKNIIYLISCKKCDKQYVGETQNALRTRFSGHRFDIIHSKNRPISHHFNLPDHSIEDLLIMPIESIPDSDLIKPKTKRLQRESYWMDQLQTVAPNGLNIQHDNQMIPFVATFNHTAAKTSSIVKQYYSELQNRFPNVYTKRLVIAYKRNKNLSNFLVRGRLDPIESNNT

SEQ ID NO: 3035 - protein, 725 aa, synthetic construct
  source 1..725: note = Description of Artificial Sequence: Synthetic polypeptide
MFSCRFFLIRKSDRKICLDCKVIPGESLTTQHRVMVMDVRVKRRAKRRSQNGAPRIKWWHLKGEKLRIFQHKILEGGFRQPHGSANDMWERMAHEIKKVAKETLGESRGFGPRGKESWWWNDSVQSKVRIKRDCFKDWSRCKNVETWDKYKIARKEAKKAVSEARTQAFEGLYQSLGTKEGEKSIYKLAKGRERKTRDLDQVKCIKDEEGRVLVQERDIKGRWKKYFHNLFNEGYEILPDSNRLDIGEEDRNYNYYRRIQEHEVREALKRMSSGKAVGPDNIPIEVWKSLGDRGIVWLTNLFNEIMRTKKMSDEWRRSTLIPIYKNKGDIQNCANYRGIKLMSHTMKLWERVIERRLRKETRVTDNQFGFMPGRSTMEAIYLLRRVMERYRTDKKDLHLVFIDLEKAYDRVPREILWKALEKKGVRIAYIRAIKDMYEGASTSVRTQDGTTEDFPITIGLHQGSTLSPYLFTLVLDVLTEHIQELAPRCMLFADDVVLVGESREEVNGRLETWRQALEAYGFRLSRSKTEYMECNFSGRRSRSTLEVKVGDHIIPQVTRFKYLGSFVQNDGEIEADVSHRIQAGWLKWRRASGVLCDKKVPLKLKGKFYRTAVRPALLYGTECWAVKSQHENQVSVAEMRMLRWMSGKTRHDRIRNDTIRERVGVAPIVEKLVENRLRWFGHVERRPVDAVVRRVDQMEESQVKRGRGRPRKTIRETIRKGFRGQ

SEQ ID NO: 3036 - protein, 1088 aa, synthetic construct
  source 1..1088: note = Description of Artificial Sequence: Synthetic polypeptide
  VARIANT 232: note = Any amino acid
  VARIANT 487: note = Any amino acid
  VARIANT 621: note = Any amino acid
  VARIANT 707: note = Any amino acid
MGIFCCGRLKTKRQRHTPASKGVSRLTLACWNIRTMLDTANSGRPERRSALIAHELSRLNIDIAALSEVRLHEEGSLKEHGAGYTLYWSGKSKTESHLSGVGFMIKNSIVSKLENLPIGHSDRIISLRLPLHNKQHVVLFSIYAPTLQADPAEKDKFYSDLRRLTQKVPIDDKIIILGDFNAQVGKNFEAWKGVLGKHGVGSCNDNGRLLLEFCAEQQLTITNTIFQQKDSXKTTWMHPRSKHWHLIDYVLVRQRNVRDVCHTRVMPSAECQTDHRLVRCKLNFHFKPKPKRGGIPRRRLNVNNLQIAAVRDSFQANLQTRLEDHLIDSSPEALWQHIKNSILQSSVESFGFSLKKNKDWFDDNNQEVQELLTKKRSAHQAHLAQPLCHVRKAAFRLACSKLQQKLRDIQNKWWLNLAEKTQLCADLGDHRGFYEALKAVYGPTYQVQSPLLSADGQTLLTDKISILNHWSEHFQTLFSANRVVQGXGIQHILQHLVKNELDIAPTMGETLKAIQQVKTGKAAGVDGIPPEIWKHGGQALHAKFHELVVRCWEQGKLPSDFRDAIIITLYKKKGVKSDCSSYRGITLLSIAGKILARILLNRLVPAIAEELLPESQCGFRXNRSTTDMVFVLRQLQEKCREQNKGLYVTFVDLTKAFDTVSRKGLWLILERLGCPPKFLKMIILLHEDQQGQVRYGDALSEPFPITXGVKQGCVLAPTLFTIFFSMMLQRAMVDLDEQNGIYIRYRTDGSLFNLRRLKAHTKTLNHLVRELLFADDAALVAHTEAALQRLTSCFAEAAELFGLEVSLKKTVVLYQPAPQEDYHHPHITIGESELKSVQQFSYLGSIISSDATIDKEIDNRIAKAYRAFGKLHKRVWCNKHLKKSTKISVYRAIVLSTLLYGSESWVIYRHHLRLLERFHQRCLRTILNIHWTDYVSNVTVLEQAGVTSIEAILLKLQLRWAGHVSRMKDHRLPKIVFYGELATGCRKRSAPKKRYKDSLKQYLSLGHIDYHQWSTLASNQETWRHTIHNAVVSFENTRRISLEEKRQRRKNRAPPIPPKETFRCAFCNRICLSHIGLFSHQRACSKRG

SEQ ID NO: 3037 - protein, 997 aa, synthetic construct
  source 1..997: note = Description of Artificial Sequence: Synthetic polypeptide
MNSSTNLRPSVPGGWNVPADGSKQVYRKAEGAKNHRVSCHGFYLATYNCRTLSTEGKLLEIEEELKHVKWDILGLSEVRRKGEELLELKSGNLLYYRGTNDGRCSGSGFLINKRIKDNIIEFNSSSDRVSRLVLKISKRYEFQIIQVYAPTTSHTDEEVEEFYEEIEKIRGRKQQFTVIMGDFNARVGIQLQGESAVGKFGEGIRNERGQRLVEFAESENLFIMNSFFKKNPKRKWTWRNPSGGTAEIDYILASKKYLIEDCTVLNKFNTGSDHRMVRCKVHINVKNERKKMFKGPRSGIDIGKLKANQNLFQIELKNRFAELKANQNLFQIELKNRFTELTNLTEDIDIKNLNTNITNILIQTATEVAGKQRQVKNDKLSDKTKLLLNKRREMKINGNAVSKKIEYAELCKTVRKCITDDIRKYNCNLVKKSIEENKGIKSVKKHLCCGRKRIFALKAKDGKIIKNQEDILKRVEEFYSDLYRDTNNSCLVQNSKSEIPPILKEEVHLAIKKMKKGKAPGEDGITVDILHEGGEQIEDILTDLFNRCLKQKDVPEDWKNATVILLHKKGEREDISNYRPISLLSVLYKVFTRILADRLKRSLDEAQPREQAGFRAGYSTMDHIFVLREIVERTNEYEIPLCLAFIDYEKAFDSVMTSAVLNALANTDTDSGYVDIFSKIYSQASARIRLHKYSEKIKIGKGVRQGDTISPKLFSAVLEEVIKKMDWDKTGLKIDGEYLSHLRFADDVVLLASNPNELQNMIQSLATESKKVGLRINISKTKVMYNNFADQQKIKLDNIVLEEVSGYIYLGQLLTLDGDLMPEINRRIKLAWSAFGRNNSILKGKMPLCLKRKIFDQCILPVLTYGSETWTLTKRAIQRLQTTQRSMERCMLGITRRDRKRNTWVRSQTKVIDVIQKIKKQKWTWAGHIIRINDNRWTTKVLHWIPRDKKRPRKRPHYRWRDEIVNFTSKCWIREAVDRKNWKLLGETFILQWIDNG

SEQ ID NO: 3038 - protein, 994 aa, synthetic construct
  source 1..994: note = Description of Artificial Sequence: Synthetic polypeptide
MMSGTHDSDNARAFPGVGDAQSLRRPRAVRSRLGLSHQERVRLKKLARRPLLVRIASLNVGTMTGRGREIVDMMERRKIDVMCVQETRWKGDKTRELGEGYKIFYSSASKEGRNGVGIITSRKMKENIIEVSRRNDRIMRMKLDIGETIHVVSAYAPQVGTSMEMKDTFWKTMDEELRQLEEKDRVIIGGDLNGHIGTNKRGIERIHGGHGFGDRNQEGEQIIDFAVAFDFALANSFFNKKEEHLVTFKSGGNSTQIDYFLYRRKHLKEVKNCKVIPSDHVATQHRPMLMDLHLLRPAGREKVKTRVKVRKTKWFKLKDTVLRSRFKETALQRVSMDFEDVQEWWNRNAEVIRCTGREILGETTGKCWENKESWWWNQEVQAAVQEKRKAKKKWDSTHAPADLEVFKVRNKQAKKKVAQAKAKACQELYDDLETPEGQKKIYSIAKHRSQTAKDITHIKQIKNVNGEILRNTGKIQDRWKEYFEELLNVENERKYHEDGIPNEGLTRDITKSEVKVALKQMKNGKAVGLDGIPAEAWKALGEEGLDLLWDLLGKIYREEEIPDEWRESIIVPIYKGKGDIQMCGNYRGIKLMSHTMKILERILDKRLRAEVKIGGQQFGFMPGKSTIDAIFCLRQMMEKFREKQQELHLVFIDMEKAYDRVPRQEVWRSLRLRNAPEKYVRLIQEMYRKTTTKVRTCLGETSSFEVGVGLHQGSALSPYLFNTVIDVLSEKVREEAPWNMLYADDVVLCARSRAEVEEKLENWRKALEDRGLKISRSKTEYLACNIGTQENEELKLMETTVRKTDHFRYLGSIVDELSETGREVNNRIQAGWKNWKEVSGVLCDKKIPVRLKGKVYRTVVRPAMLYGTEALPLKKSNLQRMKVAEMRMLRWMCGVTRADRIRNEHIQGTVKVTDIASKIQESRLRWFGHLMRRDEDYTGKRLMNIKVEGRRKRGRPKRRWQDIVDDDLRSKGLRREWTKDRTQWRKLIKNSDPI

SEQ ID NO: 3039 - protein, 934 aa, synthetic construct
  source 1..934: note = Description of Artificial Sequence: Synthetic polypeptide
  VARIANT 879: note = Ile or Leu
  VARIANT 887: note = Any amino acid
MKNFTFDVLGVSEVRWTGKGELSTGDFIWSGEEKHHFKGVGFLLSKKAQKCLISYNPISSRIISARFSATPFNISIIHVYAPTTDASDEDIESFYGEIKNTLRETPKKDFTIITGDWNAKIGSNNTGWESAMGKEGYGDRNERGERLLEFATEHNFYICNSRFRQKPCRKWTWTSPDGIHHNMIDLILVQSKWKTSVQNCRTFQSADIQLDHSLVLCNIKIRLKKQSTTSQGTLDFRKRNSNDLKQPPIKQAYEKSLNEQLKKITPTMSLDEHASILESAIKTAIKSSLAVTEKPRKPWITENTLKVANEKRKWKLKRHISEENNNIYKAHCIQVKKLAKEDKENWLNEQCEAAENGLKTGKTHQAYKLIKMLRKPFTPKLNILKDDAGKILQTKTAITNQWTKYCSTLYNGSNNNQSQATDAELEEITPPADEYPCPHILHSEVEAAIRTLKQRKSPGFDEITAEMIKAGGPKLTASLHELCQKIWLEEKIPTNWGKTILIPIPKKGDLARCENYRTISLISHLEKVFLIILLRRLQHQLEPYLAEEQAGFRKDRSTVQQILLVRLLAEKAKRKGKKIYNCFIDFQKAFDSINQQRIWAVLASFGVDRKVVKLLQNIYENTRLAVKTGNDMGTWFKMLIGSRQGDPLSPLLFITYLERTMDSVTKLNLGVTIQGSIISNLRFADDINLMNEDLQALQDQATALQASAEKSKLRINTSKTKTMVFGARNIEQQIEINNQPVENTEQFEYLGSIITWDNNCSVEIKNRIAKATGALASLKHIWKSSKITVPTKLRILSVCVFSVLLYAAETWTLKENDKKKLLAFEMRCYRRLLKIKWQDKIRNEEIRNTLNIHTTIIDLIRQRKLRLFGHICRMDNNRXIKHVVTSXMNGKNKQGRPPRAWMDDITDWCKCSAQEAFHRAQNRNQWKTATRTND

SEQ ID NO: 3040 - protein, 628 aa, synthetic construct
  source 1..628: note = Description of Artificial Sequence: Synthetic polypeptide
  VARIANT 6: note = Any amino acid
  VARIANT 38: note = Any amino acid
  VARIANT 45: note = Any amino acid
  VARIANT 48: note = Any amino acid
  VARIANT 77: note = Any amino acid
  VARIANT 291: note = Any amino acid
  VARIANT 613: note = Any amino acid
MRLTVXLANSNCTIKDVSVLNQFNTGSDHRLVHAKVKXDIQCERXRLXQHGGQKVKKEEYSLKLQTDSKCSQKTKVXYGIHTMRQCRRNRGNSTKKSRQENIHQNTGADRKEKEDEDQIHYQPDRIEDEVRKSPRRRQFNIKLLKEGGVPLYKQLAGIFSDCMRTGQIPDSWKNAVIVPIHKKGDKTDLRNYRPISLLSTIYKVFTIILTRRLEQVLDSNQPREQAGFRKGYSTMDHIHTINQLKEKCKEYHISFCMAFIDYEKAFDSVSTEAILTALSNQGIETTSTQNXCCKDSGIAPRPPSVRRNLLRIIYEEATAIIRLHKDSRKIKIQRGVRQGDSISPKLFTACLEEIFRQINGWEHKGININGEYLNHLRFADDIVLFAQTPNELQEMLSDLKTESEKIGLQINYEKTKVMFNAEVIPQPVTIEGRTIERVEEYKYLGQVITTQGDQMREIQHRTQLGWHACGRYSNFLRDNRIPICLKRKLFNMCILPVMTYGCETWTLTKKMEQKLATTQRSMERYMLGFTRRDRKTNIWIREQTKVEDILVTVRSSKWHWAGHIARYTDNRRTKRITEWQPRQGKRYPGRQYKRWRDDIRKVIGSQWMQIAQXRYIWKQKEAYISSSG

SEQ ID NO: 3041 - protein, 975 aa, synthetic construct
  source 1..975: note = Description of Artificial Sequence: Synthetic polypeptide
MIRSSQAENDARGANPPGGPIADVATGKKDHLSCKDLFTIGTWNVRGLNIGKLEIIKREMTRTGLDLLGISELHWTGSGDLKSDDYTVHFSGNDHNRRRGVAFVANKRLAKYIENARCISDRIMTIRLRGKPLGVTIIQVYAPTADADKQDIVDFYTAIQNALDQTPKKDIIYIMGDFNAKVGDGEDGQVVGRHGLGDRNDAGDRLVQFCQENKLRITNTFFKQHKRRLYTWTSPNGQHRNQIDYILCQQRWRGSITAAKTLPGADCGSDHQLLIARIKIRLCKVKKTVVAKKFDVSRIPTQYTIEVRNRFEALSLDGGQTEELWAMIKGTIIETALEYVPYKMPTKGAVWLTEKTLQIAEKRREAKAKGEIDKARRLHADFQREARIDKNNALNARCISLEEAFRKGRTRELFATVKQVKTPFSARQSTIKDRDGNELTDQQDIKERWREYTEDLYTSIDDQQNEDQTDQGLQEPDLLESEVEWAMRQLPSNKAPGIDGIPAELLRPIPRAALTALCQQIWKSCTWPADWRRSVFVPIPKKGDTRDCANYRTIALIPHASKILLKVIQKRLGNVIDRELPDVQAGFRRGRGTRDHIANLRWIMEKAREYQKKLYMCFIDYTKAFDCVEHSKLWVALRELGVPEHLIRLIRSLYQNQEATVRTRYGDTDWFKIKKGTRQGCTLSPFLFNLYAEVIMRKLDLEESEVGVKIGGRTISNLRFADDTTLLAESEKDLKRMIMKLKNESEKMGLQLNIKKTKIMTTAAKEVHIKINNEEIEVVDSFIFLGSKVDCNGDWRPEITRRIALGRTAMVNMDPIWRCKDVSITTKRRLVTAIVFPIATYGCETWILTKADRRKIDAFELWCWRRLLRIPWTARVTNKSVLERINPDFSLEGKITRQKLTFFGHVMRANSLEKDVMLGRMSGTRPRGRPKTRWLDTIKKDTGKNIEELRELVRDRKTWRDMTHRIAKNRTRLNG

SEQ ID NO: 3042 - protein, 649 aa, synthetic construct
  source 1..649: note = Description of Artificial Sequence: Synthetic polypeptide
  VARIANT 95: note = Any amino acid
  VARIANT 280: note = Any amino acid
YDLALIQEPWHYKGQIRGLNCKEGKLFTFTSDSGPRTCVFVRNNINVSPVWDFCSRDITTVRVKLDEGGVSRELIVSSAYFPYDKDELPPTPEFXLLVEFCQKNHFDLLVGVDANSHHVVWGSKDINRRGEYLLEFLMGTNLFVLNKGNEPTFVVVNRREVIDLTLGTQNISDLIENWHVSGEPSSSDHRYICFNLQGMVPSQVTYRDPRRTNWASFREDLKFNLGGIQSRFCSVVDLEMTVDQIQQAILLSYHQNCPVRTARSSRQVPWWNEQLGGLRXNVRRLFNKAKRTGDWDTYRSALTCYNKAIRKAKRSSWKRYCQGIEDIPDVSRLVKIMSSGNFCKVGSIRLPDGSMTSTCKDSLKELFRVHFPGSTLIEGSSCLQVQSDLDGHVYHAKREDWGLVRGVINQSNIRWAVSVFKPFKSAGPDGILPVFLQQGIDILASPLCRVFRACLAFGYIPWSWRQVRVSFIPKPGHSSYTEAKSYRPISLTSFLLKTMERLVDRFVRDGALLKTPLCRSQFAYQSGKSTENALHEVVSLIERAIGYKEIALGAFLDIQGAFDSTSFEQISLAASRHGVCSTIIRWIGSMLKHRVVYSTLYDEEVKILTDRGCPQGGVLSPLLWCLVVNELLTLHSMGKVSSLLGMLMT

SEQ ID NO: 3043 - protein, 480 aa, synthetic construct
  source 1..480: note = Description of Artificial Sequence: Synthetic polypeptide
  VARIANT 314: note = Any amino acid
  VARIANT 317: note = Any amino acid
  VARIANT 480: note = Any amino acid
MRAAFDKVNRREMWEMMEKLGLGVRIRNRVKELYRGTRSEIRIGEDKIGGFELHKGVRQGCPLSPTLFNVAMADTEKELSKVQEGGIVLGKKKFWSISYADDVVMVANNATGLKQMLKKFKKIIERKGLELNTEKSKIMVFKNGGRRKKEDSFFWEKKEIEVVKNFEYLGYMLKENGKEEAQIKKLKEKASTVMSSMWGLGEELFRDNWELRMRLFDTMVKSVMEYGAEVWGWKGKEELEKIQRKYMKWVMKLDRTTPEHVLHLETKRYKLETRTRRRAIKYEVKLSKAKEGTLWRECWRTLEKEEEKERRRGXRRXNREEELNKRGWALSEYHRRLRAGEQVWSELERIEKDIQWQKWESEMRDSRQARDVKELIKPQGETPEYLRRTGNTGKKGLAMTARFRMGNEARGYKYWMKEEERICRLCREEEETFEYIFSRCNRTGSRENNWKNILNGERKNLAKLYRVIWVRKEKEKEEEX

SEQ ID NO: 3044 - protein, 1207 aa, synthetic construct
  source 1..1207: note = Description of Artificial Sequence: Synthetic polypeptide
  VARIANT 282: note = Any amino acid
  VARIANT 511: note = Any amino acid
  VARIANT 512: note = Any amino acid
  VARIANT 513: note = Any amino acid
  VARIANT 514: note = Any amino acid
  VARIANT 1098: note = Any amino acid
MEALKTQNIVSERISKIEQRLGPLEKRLKALDELPALKTRIHNAESTITELQAQIQDLSSRSPTMQQDNGSTVPNTAEICSLRSELAEVKRRQEQTSNCVVVVTGLHYTRETSLHLLAFSVVNALDPTVLRRDVASVRTMGRLDATNSSARGDGRLPPLAVTLSSSALARSIVIAKARKRKLHTSELDATLLEEAKALSPDHQGLININELLPSDVHKLRTRARLEAKKRQGCRTFVREGRLYTCAATMTASVLRSSTPTPSWRLFPGFRPLPTSSNTEATXQYTHQTLSSSAQERSKVKSEYLFCEVSAKGVSPIFVGVVYRPPHAPFFQGSNFIDQLTTHMHNYSTKVIMGDFNSDQLSSSEDAKFIKAFIDENSLSSVPYGATHHKQGSDTWLDLCLIDEQDRLLSYWKTNSPFINGHDLITATLDVQIPRYVPNTYSYRNFKGISAEKLRDFLSACDWSSLTSSSLDECISTLNANLTNAINHLAPLRTVTPRRQRHPWFTTVSHVXXXXRILVALRDLVSERDRLYRRFRDSRLDSDLRIYRLARDNAHKQVEEARLNYYYSRLSTLTDVAEIWRELEKLGISATKAPSPSRFTTDELNKHFSSISNDPLAPAVEDYLLTLESLDLPEHFEFSTITESDVLAAVSHFDTQARGSDGIPQVVISKALPVLAPLLSHIFNLSLSEPCFPSAWKLSLVRALNKVSSPTALTDYRPISLLCFLSKALEWLVHRQVSEYLESRLLLDNFQTGFRTGHSTHVRVGINKKKVTLLLLFDFSKAFDTVCHVRLLRKLSTFGFSKQVIRWFASYLTGREQAVVGDNSERFSPRRPAGSVWSLLLHCTSTTSVSALIPMFPILSMRMTCKFTVNATLRSSILYQTRRAFLSSASRRVRLVLAVALYINDIGFCLDSDVSHLIYADDLQIYSQCHLEELDSLSNKMSANAERIMGWAAQNRLKLNVNKTKAIVLGSPYYINALPKVTLINMGVPGQLHLLIWGCQVSFESSVRNLGLVLDSKLTWKEHVTQVCKRAHSLMYRLYFFRKSTNLRLRKHLVQALLFPIIDYCSLVYCDLTQELDLKLQRLVNTGIRYIYGVRRDEXISPYRRELQWLTTAGRRKYFTACFLRKMFNSVVPSYVLAFFDFRVTLRPVRGEVTPLEIPAFATETLRNSFHISASYLWNNLPSHIRNTSSTVTFRKLAKDHFFQLENT

SEQ ID NO: 3045 - protein, 1178 aa, synthetic construct
  source 1..1178: note = Description of Artificial Sequence: Synthetic polypeptide
MPNTRTLASRGEIRGLGGAGRIFRDPTCSVPRACILVKGFDALLLPARCSRDLTAIKIRLPVGEGSEREVVVASGYFPYDSQEEPPPREVQDLVEYCRQRSIPLILGCDANAHHIVWGSSDTNGRGDALLQYLVTTSLCIMNRGREPTFYNSVRSEVIDLTLCTVGMEGWVGSWRVSNEPSLSDHRYIQFEWKERCSETRAFRNPRKTDWAFFRENLRNELQSFKPSFGTTDELDHWAFELGEIVNISFQRSCPWTIPRGTWGTPWWNRELEDLRRETRRTLNRAKNTRNSIDWRIHREAQRLYKNRINAVRIKGWRDYCEDIERYPDAARLLRILAKNPEVWLEAIRLPTGEYATSEEECLKLLLEANFPGFRLSHEMGDESSGRNRQQRAAWDLAAKVVTPEKVKWAIRNFQPFKAPGIDGIYPAFLQEGLEELVGPLVKLFRASVALAHVPEIWKTAKVVFIPKTGKPSHTTVKDYRPISLNSFVFKTLERLVDRFIQDDILTVFPLHPNQHAYRAGFSTETALHSAVWRIEEQLERGEVMVGVFLDIEGAFNCTSIEAVVKEAGLHGMPGPLIKWLQGMLTRRTVISSLGTVTVSGEVSKGCAQGGVVSPTIWCLVANGPLEALNGWGCYAQAYADDFLILIKGSEIGAAMDAMQLALRKVERWCCSTGLSVNPDKVEMVIFSRKYKLDAYRAPKLSGVALQVKDSAKYLGIVLDKKSTWEKHLTAQCDKFLVALWTCRRAFGSTWGLSPRIILWLYRAVLVPRLAYAALVWWPRAELAGARAAPEKLRGQVLRGATGAYRTTPTKALGILVKVEPLHLTIIGMAAKAAHRLNAYGQWTQGTRHTRLPGGVGLLPEFSIKTDMMIPRYFFGRRYGVVIPTREEWKARRDSLPGTGDVWYTDGSRAETGTGSGYYCRRDGRGTFFSLGRYATVFQTEIYAILTCAQRNIELGARDRIITICSDSQAALRALMAHRTTSRLVWECKVVVNQLTAHNNKVRLLWVPGHTGIRGNEIADRLAALGAKHPPIGPEPYTGAARCLLAGEIRDWVEREHTKEWQGTQGCRQAKAVMGQDTNVGWTKCIAGGSRNNSRLLTQIVTGHIRLRYHGLKMGKEATGVCRWCEGAEETPTHVLTVCPKFAQLRHQCLGELFPTYEEIRALDAGAILTFWRRAGLPA

SEQ ID NO: 3046 - protein, 31 aa, Epsilonretrovirus sp.
HDFGHLWMHRGFVTSAGTPIKNHKEIEYLLK

SEQ ID NO: 3047 - protein, 1309 aa, synthetic construct
  source 1..1309: note = Description of Artificial Sequence: Synthetic polypeptide
GILPHSPVLPVRMNTPPARPRPRRRELNQQQRQQQQIHLPRARLERMCPKRINRHPHRLLAPEPNRLREHRLRLSRRPLRTSSRRWMTFGRSRMRPFRHKTPCLKGSLELRKGLALLQSRLKALDDLPALKTRLNNVESSISELQAQYQELSSRSPAEQQNISIAPASEEINNLRSELAEVKRRQERSANNVVVISDLAYTQETSLQLLAFTVLAALDSTVLRRDVATVRTMGRLDATTTNAQGDSRFPPLAVTLSSSALARSIIVAKARKRKLHTSELDAALLEEARALCPDHQGLININELLPPDIHKLRIKARLEAKRRRGCRSFVRDGRIYIRSGEDSERATIISTDAELEAFLAHTPPIANTDITHGFFSPYAANSQHGHHTLRHTPIIPPKPPSKSSNSSTSASKASLSEGLRVCHFNANSLTGHIEMVRLFLSTRSPFHVIAVTETWLSDKITSIPSLDDYILYRRDRNRNGGGVALYIHHSLTASVISSSDGEWSGKPGKPEYLFCEISAKGVSPIFVGVVYRPPHSPFIQGSNFIEQLTTHMHNYSTKVIMGDFNSDQLSSSEDANFIRAFIDENSLTSVPYGATHHRQDSDTWLDLCLIDEQDCLLSHWKTDTPFINGHDLITATLDVQIPRHVPATYSYRNYKGICAEKLRDFLSACDWSSFTTSSLDECITILNANLTNAINHLAPLKTVTPGRKRHPWFTAALRDLLTERNRLYRRFRKSRLPWDLYFYRIARDDAHKQVEEARLNYYYSRLSTLTDVAEIWRELENLGITTSKSPSPARFSSDALNKHFSSISNDPQAPSVEEYLRTLESLDLPEHFIFRAITESDVSAAVSHFNTQARGSDGIPQVVISKALPILAPLLCQIFNLSLSEARFPSAWKSSLVRALNKVNSPTALTDYRPISLLCFLSKALEWLVHKQISEYLETRLYLDNFQTGFRTGHSTQSGLIKLTDDVRLGIDRKKVTLLLLFDFSKAFDTVCHVRLLGKLSSFGFSKQVIRWLASYLSGREQAVIGDNNELSTSLPLNTGVPQGSVLGPLLFALYINDIGFCLDSDVSHLIYADDLQIYSCHLEELDSCSVRMSANAERIMGWAALNRLKLNVLKTKAIVLGSPYYINALPSIANTFINIGGARVDYESSVRNLGLVLDSKLTWKEHVTQICKRAHSLMYRLYFFRKSTNFRLRQHLVQALLFPIIDYCSLAYCDLTQELDTKLQRLVNTGIRYIYGVRRDEHISPYRRELQWLTTAGRRKYFMACFLRKIFNTSVPTYILAFFDFHVALRPVRGEVTPLDIPSFKTETL

SEQ ID NO: 3048 - protein, 1394 aa, synthetic construct
  source 1..1394: note = Description of Artificial Sequence: Synthetic polypeptide
  VARIANT 123: note = Any amino acid
MKIISWNVRGLGSSRKRSVIREVLRKEKPTIFLIQESKLTEVDRRWVRSVWSARGLSWAFTQSWGASGGIITIWKNEEMDCTEELIGNFTVTIKLRRKEDGFEWALTNVYGPNSYRERDDFWXELAAIRGLWNGPWCLGGDFNVIRFLNETTNPNHRVTSSMRKFNLFVDSYELRELPMLQANFTWSNFQEEPLCCKLDRFLFSSDFESAWRGLAVRALPRPTSDHCPVRLSQENLGGGPCPFRFENMWLLHPDFIKKVQLWWEEDQVEFRWKGYKFYKKLQALKARIKAWNKEEFGRVEERKEWIANRIQEIDGGEAERRLTVGEREERWKLKQELQEIIRKEEISWRQKSRCKWLKEGDGNTKFFHTLANGRKRKNFVGRLEWNGEVITSEEEIARAFVEHFKSIYDSPRREREEIPDLDWLPGNRVLMDQLEKNFEVQEVKDAIFSMERSKAPGPDGFTMAFYQDCWDIIGGDLMEVFLEFFERGKINSGANATFIALIPKKVNANHPKDFRPISLIGSMYKVISKVLAERIKKVLPSLISPNQGAFVSGRQIIDQILIANECVDYRKRQGEKGLICKLDLEKAYDLVDWGFLLEVLRIRGFGERWCMWVKGCISSCHYSILVNGVAKDFFPAKRGLRQGDPLSPFLFTLIVDVLSVQITRADARNLLRGWRVGREEIVVTHLQFADDLILFCEGDPEELENLKVLVENFEKVSNLRVNWNKSCVAGINRQEVEVASLARSLGCEVSDWPLKYLGLPLGGNPRSVSFWYPVLERFSKRLAGWKRNYISLGGRITLIKSTLANLPVYFLSTFKLPVKIANQVEKIMRDFLWEPGDTKKDHRVKWEVVSRKKDKGGLGIGNIRIRNAALLGKWLWRFPKEQESLWHKVIRSIHGMAANGWDAGLDPRASRFSPWKDIVGILPVFSPFIRYDACVGNKILFWEDLWIGESPLKDRFPNLYSLSLKKSQFISSFRASGDSWDLGLRRGLRDSEVDSANDIFSLLSSVFLDHSSPDSRIWAETSTGSFSCSSFFNALVLPSNPVSSFPVKEVWSAPVPPKVRAFCWEVVLQKINTLEVLQRKRPNWCLSPHVCSLCLRNGETVNHLLISCPFSALIWDWFSSLFDCRWTPPTSVADLFDPSFFRQPKKKGRVMWRTTRAAILWAVWEERNNRIFQGKEKSAPEVIEGITIKAVHWLKTLDLFKDVSIDDLIRGWSILARSSTSSPTIQAVWSPPLQCNVKLNFDGSSIGNPGPSGIGGVFRDAEGKILALYSGPIGLGDSLRAEVLALLQGLRWAKQLGFQQLEVEGDSKLVVGWLQSNSLGTWSLRQHVRELLSLTRELGAQVYWSRRSANALADNLAKQGVNREVFVLCSVVSYLLFRGHLLLWKVTVVSSGFI

SEQ ID NO: 3049 - protein, 1279 aa, synthetic construct
  source 1..1279: note = Description of Artificial Sequence: Synthetic polypeptide
  VARIANT 338: note = Any amino acid
  VARIANT 720: note = Any amino acid
  VARIANT 1233: note = Any amino acid
MDMCGCLQMSMGQMTTEREELWEELADVRGLWDGPWCVGGDFNVIRYPEETNKTNQRVTTSMRKFNRFVDAFELKEIPLAQKTFTWSNLQARPICSKLDRFLFSVDWEEHWGNLTSRALPRVTSDHWPIVLCKEERRSGGPAPFRFENMWLLHPGFTNRVREWWNECNPLVEWEGMRFHKKLQFLKAKIKEWNILEFGRLEERKRDLMDQLESLDSKEERGEFGEEDNELRRGLRRQLEDCLHKEEISWRQKSRCKWLQEGDRNTRYFHSLADGRRRRNFISKLVVDGIELTQQEEIAGACVEHFKSILRRPVSGRVWVEGLDWPDVGGDNRRSLERXFDLEEIKEAVFSMDRTKAPGPDGFTMAFYQDCWDILKEDLLMVFEEFHRRGIVNPGVNSTFIALIPKKKEASHPRDFRPISLVNSLYKIIAKVLSLRLKKVLPDIIEQNQGAFVSGRQITDQILIANESVESFKKDKKKGVVCKLDLEKAYDMVDWEFLRKVMTKMGFGARWCKWIMGCVRNCHYSVLVNGTVVDFFPATRGIRQGDPLSPFLFLLVADVLGKLIHRADSRGLIRGWRVGREDIPLTHLQFADDTILFCEGGNVSFIRNLKLVIQLFEQMSNLKVNFGKSCVVGVNLEEGEIRESAEVLGCEVSGWPLSYLGLPLGDNPKRESFWNPVVERFEKRLVSWKKNYLSLGGRTTLIKATLANLPIYFLSVFKIPXKVSSRLERLMRDFLWEPGEEKRDHRVSWKVVTRSKNYGGLGLGNIGKRNSALLGKWLWRFPLEQEKLWARIVASIHGMEQNGWDAGIRARTTSTSPWKAIHDLLPVFSPLVRYDLNSGNSIKFWEQIWVGNVPLKDQFPSLYALSDFKNEPISSFITPSSSSSGFGWNLGLRRAVRDSDLDSISSLLELLDNVFLDPSKVDSRIWTPTPTGSFSCASFFKVLCQSTSPATSPFPVNEVWCRPIPPRVGSFCWEAYLERFNTGDLLQKKRPNTCLSPHWCVLCKADGETGFHLLVSCQFAKSIWEWAFSLFGRRWNPPSDLQSLFSPSFFRWHMKRGRTMWRGLRAAVCWSLWEERNSRIFSEDERGAEELRAVIHIRAVQWLKSLELFTDYTVEDMLRKWGEIANCTQTKPVIRVSWTPPPAGFLKLNFDGSCRGNPGQSGIGGVFRDENGVISALFSGPIGVGDSLRAEILAVMEGVQKAKEMNVRKLIIEGDSEVVIGWLIKDNCGLWNYXNERRKFRWLVREMEIRMSWVKRSANSLADGLAKQGIEREAMFWAKL

SEQ ID NO: 3050 - protein, 1402 aa, synthetic construct
  source 1..1402: note = Description of Artificial Sequence: Synthetic polypeptide
  VARIANT 4: note = Any amino acid
  VARIANT 24: note = Any amino acid
  VARIANT 171: note = Any amino acid
  VARIANT 235: note = Any amino acid
  VARIANT 440: note = Any amino acid
  VARIANT 591: note = Any amino acid
  VARIANT 612: note = Any amino acid
  VARIANT 1018: note = Any amino acid
  VARIANT 1135: note = Any amino acid
  VARIANT 1170: note = Any amino acid
  VARIANT 1216: note = Any amino acid
  VARIANT 1254: note = Any amino acid
  VARIANT 1381: note = Any amino acid
MRIXSWNVRGLGSARKRATIKEVXKKFNPDVVLLQESKRMDFDCRRARSVWRAKGIKWAAAPSWGSSGGIVTLWKEDVLIGLEELIGDHSVSLKFRQVEDGFEWVLTNVYGPNDYRQRKKLWEELSDIRGLWEGPWCLGGDFNVVRLTEETNNPRQRVTTSMRSFNQFVDXFELKELPMLNNTFTWSNLQSSPICSKLDRFLFSTDWEAHWGNLTSRVLPRLTSDHWPIVMCKEXLRGDGPAPFRFENMWLTHPGFIEKIKEWWQHYNPPVQWEGMRFHKKLQFLKSQIKEWNRLEFGRVEERKQVLVEQIEELDMKEGRGLFGEEDRERRWSLRKQLEDLLIKEEISWRQKSRCKWLKEGDRNTGFFHSVANGRRRKNFISKLEVEGTVISHPVEIAEAFVGHFKSIFRRPLNERIWLEGLDWPTLSPENREWLERRFXLEEIKEAIFSMDRTKAPGPDGFTMAFYQDCWGIVEEDIGSVFEEFHRRGIINPGLNSTFIALVPKKKEASQPRDFRPISLVNSLYKIIAKVLSLRLKKVLPSIIAPNQGAFVMGRQITDQILIANESLESFRKSKKKGVVCKLDLEKAYDXVDWSFLLEVLKSFGFGDSWCXWIWGCIRSCHYSILVNGTVVDFFPASRGIRQGDPLSPFLFTLIADVLGRLIQRADSRNLIKGWRVGREEIPLTHLQFADDTILFCEGGDIEWIRNLKLAIQLFERVSNLKVNLDKSSLAGVNLEERELREYADVLGCATSDWPMAYLGLPLGDNPKKVSFWNPVVERFGKRLASWRKNYLSLGGRITLIRSTLANLPVYFLSVFKIPTKVSNTLEKLMRDFLWEPGEEKRDHRVSWEVVTRGKKLGGLGIGNLRKRNMALLGKWLWRFPLERDKLWTKIVASIHGLEDNGWEPGILARTTAASPWSAIHKLLPVFSPCIRYGLNSGNKIKFWEQLWVGDSPLMDQFPSLYALSDLKNEPISSFLSPSDSPSGFGWNLGLRRAIRDTDLDHILSLLAILENVFLDPXKEDTRFWVPSSSGVFSCASFFETLTQPSDPIGLSFPVKEIWSRPIPPRVGSFCWETFLERINTNDLLQKKRPNSCLLPNRCTLCKADGETGYHLMVTCSVAKSVWEWVFSLFGCVWXPPGSVQSLFSPSFFRWPKKRGKTMWRSIRAAVCWXLWEERNSRIFSDKERTIGNLLDLILLRVAHWLKTMELFSDYSVADXVRNWKEIASSALCKRTCSPSWSPPPSGFIKLNFDGSCXRNPGPSGIGGVFRNEAGAIIAMFSGPIGEGDSLRAEILAALEGIQRARELNIRCLVLEGDSEVVIRWLKGGGSGLWSYNNEKNKFKWLSRDIVVHYNWVKRTANSFADGLAKQGVNRDSTFWANFLXFLVFFGGELSLFTSPLYLSFT

SEQ ID NO: 3051 - protein, 1064 aa, synthetic construct
  source 1..1064: note = Description of Artificial Sequence: Synthetic polypeptide
  VARIANT 368: note = Any amino acid
MWKKEVLEGKEELIGQFSVSLKFRQVEDGFEWVLTNVYGPNDYRERRQLWEELADIRGLWEGPWCLGGDFNVIRFLEETNSTRQRSTMSMRKFNQFVDAYGLKEIPLSHSCFTWSNLQVNPICSKLDRFLFSNDWEEHWGSLNSRTLPRVTSDHWPIVICKEEVRNAGPTPFRFENMWLGHPGFIKKVKDWWLESNPTVKWSGMRFHKKLQHLKGRIKEWNLLEFGRLEERKQMVTAQIEALDSKEGRGCFTEEDKEQRWNLRKQLEDCLLQEEISWRQKSRCKWLKEGDRNTKFFHAMANGRRRRNYISSLEIEGATISNQSEIAGAFANHFRSIFRRPLNNRVWIEGLEWPTLKLEEREWLERKFXLEEIKEAVFSMDRSKAPGPDGFTMAFYQDCWEILKEDLRIVFDEFHSRGVINPGLNSTFIALVPKKRNANHPRDYRPISLVNSLYKIITKVLSIRIRKVLPTIIADNQGAFVKGRQITDQILIANESLEEFKRSKKKGVVCKLDLEKAYDMVDWSFLLEVMVNFGFGDRWCKWVMGCIRKCHYSILINGTVVDFFPALRGIRQGDPLSPFLFTMVAEVLGRLISRADSRDLIRGWRVGRESVPLTHLQFADDTILFCEGGDLNRIRNLKLTIQLFEQMSNLKVNFEKSCLVGVNMGEGETSECADILECAVSNWPLNYLGLPLGDNPQKDEFWIPVVERFEKRLATWKKNYLSLGGRITLIRSTLANLPVYFLSVFKIPAKVASRLEKQMRDFLWEPGEEKKDHRVRWEMVCRSKREGGLGIGNIRSRNLALLGKWLWRFSLEKDKLWVKIVGSIHGVADNGWDSGIVARTTRAAPWKAIQAILPLFSPWIRYDLHSGNLINFWEHIWIGDSPLKDQFPSLFTLSTLKNEPVSSFLVPSNSTSGFSWNLGFRREIRDTEFDCILSLLSILEGVFLEPTKTDSRIWSLTPSGSFTCASFFKALTQPPSLGLSFPVKEVWCLPIPPKVGSFCWEAFLERVNTCDLLQRKRPNSCLCPHWCALCKADGESEYHLLISCRFTKSIWEWCTSLFGCRWPPL

SEQ ID NO: 3052 - protein, 1015 aa, synthetic construct
  source 1..1015: note = Description of Artificial Sequence: Synthetic polypeptide
MTRRGQSHPDAPGLTKPLVHPKHAMRIGNWNVRTLYSSGNVAQAAREMGKRDIDIMGISETHWTGQGKMQLRDGETMVYSGREDNIHREGVGILMSKNAAACLIEWTPWNERMIQARFYSRHIQLTIIHIYAPTEDADEHLKDEFYTRLQEVLDSRNQHDMLIITGDMNAKVGDQNWDYERVMGKHGLGVRNDNGERLCELCDLNELVITGTLFPHRTIHKATWISPDGKTKNQIDHVLVNKRFRNSVKDTRVFRSADVGSDHYLVCATVKLRLRKDPKRKGNIRVKYDTSKLTEKEVRNTFNIKLRNRFQALEQEDEEERGEEVVDAKEEVERDFTIMKKALLEVAETVLGKPRKKNKPWISGESWSLIDERQQMNEKILSTRSERVKGQLRKKYREKDREVKRSLKADKKKWLEEIASEAEKAARSQHMKTLYGLTKKLCNERPRHSTAVLDKDGNLLSKKEEIQRRWTEHFREVLNREQPDNPIEPEDEVEFEFGELIEEISVNEPTFGEVKDTITTLKNGKSPGIDNITAELLKADPEFSAERVHKLLVKVWRHETIPNDWKKGLIIKLPKKGNLKECKNSRGITLLSIVGKILGRIVIDRIRNGVDKKLRKEQAGYRRGRGTTEQVFILRNIIEQVNEWQATLYVNFIDFEKAFDSVHRESLWVIMEKYGVPEKIIRIVRLFYEDFQCAVEDQGETGEWFNIKTGVKQGCNMSGFMFLLVMDWILRRSVGKGENGIRWKFTSKLDDLDFADDIALLSSTKHHIQEKTAKLDGEARRAGLKINLEKTKMLRINAKQHGNIVINGKEIEDVSEFTYLGAKVCREGGGMKDLRNRLSKARSVYTRLKRIWNSKKIMRRTKIKIYKSLVLSVLLYGCETWKMNKKDDKLLDVFQQKCLRRILKISWEDHVTNEEVQRRAGVHQLSSEVKRRRWKMIGHVLRQGRENDCSVALTWTPEGRRKQGRPKTTWRRTVERERGEAGWRNWDEVRSKAADREKWKSTVKALCATRHEEDR

SEQ ID NO: 3053 - protein, 1149 aa, synthetic construct
  source 1..1149: note = Description of Artificial Sequence: Synthetic polypeptide
MAANFLTPVFIAFLAILFNQKLHYSPNLTSGINGFGLNCILANSESILTGLEAFYSHNIRANKMNVGRSSSEHKHLLLCLLLLGGDIQLNPGPKWKFPCGSCNKPVKSNQKGIQCDNCNLWYHTRCCSINDDLYYTLAASSCTWLCVSCGFPSFSSSLFESSSIELQNSFSSLDSLHQDTQNISSSTIRSPETSPLDSSSRNSSNTRKQSKEKLTGMILNCNGLKGTDHITKFQALINLHDPDFILGTESKLCPDISTYSIFSQNYSVFRRDRNKFGGGVFQAIKSDLVCTEEPDFEVDNCEIIWTSLKLANRKSIYMSSYYRPPNQPSDSIDNLNESIRRVFNKVKNFPNIIIGGDFNLGDIEWNSSVPTPTNPATASLHQKFLQTIDDFSLSQHVKTTTRPSSGKTLDLLLTTYPNVIVNTSTASGLSDHLAVIFEVNLKPSRSLKPPHKVYQYKKANFPDLCKFMSDSSTTFFSTNPEKRTVEENWVLFKTSLSTGISQFIPQKSSRPKYKLPWINTNIKREMRKKDRMHKKAIKSKNQQHWEAFKRQRNLVSKLIKDSHNDYLNNIIGNSLKDNPKKFWSYVRSSKSESIGIPPLKNNDSSVSVTDAHKAETLNTFFHSVFTQEQLPTPVLGNSPYSSIPDLHISAEGVCKQLSELNPKKACGPDEIPANVLKEVSQSISHWLAFIFQQSFDCNKIPSDWSNALITAIHKKGLKSEPANYRPISLTSICCKIMEHIILSHMAKHLSSHNILINQQHGFREKFSCETQLISAIHDWAKTINFRGQTDVLLLDFSKAFDSVPHQRLLIKLDFYGIRGNMLNWIKAFVSNRKQSVSVNGTVSSSKSVVSGVPQGSVLGPVLFLLFINDISTSIQSNLRLFADDCVLYREVASLQDCQALQQDLDRLSVWSKTWQLKFNVSKCYHLGITRKKIPVKFTYSMDGKCITQASSTPYLGVTIADNLSWNEHCDNICKKANSTLGLLKRILSGCSPEVKDSAYRTLVRPKLEYATSAWNPYTQCNINKIEMIQRRAARFVFNDYSRYSSVSPMINSLGWESLEQRRQLNQAHMFYKIYNGLVGISFPPEVTPITRVSRQPNCAPFHQLVTLNDTYKYSFYPRTIRTWNSINLSTIPDSLAKFKDSLLLKVQTN

SEQ ID NO: 3054 - protein, 1024 aa, synthetic construct
  source 1..1024: note = Description of Artificial Sequence: Synthetic polypeptide
MINNPSNVVPVYFCLPILAFWSFLPCYFHLKAVDRGSHVATLTSEPVASTGWSYSNQELKTIRKSQPKQRLEPKLWQKLGDLGIRKPFRSRRKPRQSRHVCTGLPVVTTVDSTGHPQLSSGCSTNSSSSQTARFPVIPDTIIANMQSLLPKLDELYAAIMQFPAGIICLTETWLNESHPDPLIHLPGYLCFRNDRTTSRGGGVCTYINSQYPCRRLPEFEDLSIESLWISVRPYRLPRSVSTLLIGVIYHPPSNGEMNRQLVDHIDKNCESFLSKHPDGLVVVTGDFNPSSTGIKAQYVTHKTGLTQIINVLTRDTGILDWCLTNKPKYFQQPLQLSKMGSCDHYPILIKPNLSVTNPKAHKSSVWRRNLRRSNLDAFGRWITQFCWNTILSLQTAREKFERFYTVITDAVNTYLPLQRVQVCATNKPWIGTSLCSLIARRQKALTTLGKDSRLYKELRNQVQRECKVCRERYYPNKVAALKESNISRWWQEVKCLSGSVVSNEWWHQLMDDSTPSVQILAERFNEFLLGLTSNFAPISQQVTCSGPVPPELLITPGKAFKALSRIKVKKSSGPDPVPSVIWKEFAPELSDVVCNLYNSSLMEGFVPQELKESIVHPVPKCSPPKTLSEDLRPITLTSQLAKVMEGFALDSLFACVKDKLDPKQFSVSGKSTVLALVYFLHCILESLERGENYVRIFFADFSKGFDLVDHNVLMSELDLLGVNEYLQNWIAAFLTARPQRVKISGHTSSPVFPNGGIPQGTKLAPLLFAILVNRLASTWPYRIKYVDDTTIFEVIPRCSPSYLPFIANDICNFATERGMRLNPKKCRELVINFLQYQPSPVNALQLMGSVIKRVESYKILGVHISSDLSWNKHVDYVVKKANKRLYALRLLKKSGVPVQDLIAIYCVLIRSVVEYAGPVWANITGFLVDIVEGIQKRALRIVLPHLRYKEALETSGLQSLADRRRELCISLMTSAKELEPLRSVITGGVINNVHGYSLRSGSMNTYKHISVTKRFGDFVTYRFL

SEQ ID NO: 3055 - protein, 2244 aa, synthetic construct
  source 1..2244: note = Description of Artificial Sequence: Synthetic polypeptide
  VARIANT 2: note = Ile or Leu
  VARIANT 140: note = Any amino acid
  VARIANT 143: note = Any amino acid
  VARIANT 145: note = Any amino acid
  VARIANT 197: note = Any amino acid
  VARIANT 218: note = Any amino acid
  VARIANT 232: note = Any amino acid
  VARIANT 248: note = Any amino acid
  VARIANT 255: note = Ile or Leu
  VARIANT 265: note = Any amino acid
  VARIANT 283: note = Any amino acid
  VARIANT 316: note = Any amino acid
  VARIANT 350: note = Any amino acid
  VARIANT 358: note = Any amino acid
  VARIANT 392: note = Any amino acid
  VARIANT 405: note = Any amino acid
  VARIANT 411: note = Any amino acid
  VARIANT 418: note = Any amino acid
  VARIANT 423: note = Any amino acid
  VARIANT 465: note = Any amino acid
  VARIANT 516: note = Any amino acid
  VARIANT 909: note = Any amino acid
  VARIANT 958: note = Any amino acid
  VARIANT 1134: note = Any amino acid
  VARIANT 1141: note = Any amino acid
  VARIANT 1145: note = Any amino acid
  VARIANT 1174: note = Any amino acid
  VARIANT 1176: note = Any amino acid
  VARIANT 2015: note = Any amino acid
  VARIANT 2069: note = Any amino acid
MXKALHGGPWFILSHFLTVRGWEPKFKASSTQLTYSALWVRLPELPTEFYDLEILSRIGSKLGRLLKIDTCTSSTTRGRYARICIEVPLEKPLKTHLYIGNHRQSLLYEGLNLLCTYCGRFGHPTTSCPEVVRAPNEQNXRNXQXESNSTPDTIPSKENEWKTVTFTKKSIHPPKHLNFDKGKAATMAATPAAQPLXGQSSNPTSAVLGRVTSTRQVXLQGPVIEFNNKFQXLSNAGPSDLQTDHFYXGPIPKNXGTEPLLTQQXAKAHFHTPDKLPTSLPNXLPNDPKPRLSEPNPHLTKSPPLVGYNTFSQDYXTPHZPLPCNHLLTSSTQSSSNNSEGPLHILDTLXPTQNKAIXTMHATVTSLTSDSRLPQNPCKQHDEFPCEHHHEXPTTLFPSLPNIYXHSIQTXKPNTTLXAEPQXLPNPILNAETNLHRHEPESVSEGKYTNQQPVFSSPSSHNGGXSTASEFITSNLHISAHDHGPPSPILVGNGTAGICSNIHSATQQPRGGVANXKSDSFSRNSDRRNEAGNGSLQSKSMVHDPDSSSNGTPGFQFHSSAMAISNGPDESDLGPNSQSPTLLPTSSYGSGLCTLVPATGLIQSTLPLLEPTESSRESHPTKQSSTITSSISTRTRQRYKRGTDSNSCGDEGDKNRILVVKRDPILQPQRTVRKKFILKCPPEMVTCSLNFRQTTNPEVGKYAMVIIPTLLQLPLSLDPMTSSVVHPVTQAPMSQPRNPNSYMNFLVWNCRGSHNPEFRRHFRSLLDNHRPTLAILLETHMQDHASLREDFNFGNMAQAPANGLIGGLVVLWNADLINVTEMRISDQEIHCMVQVSPTKPPWILSAIYASRHYQLRDILWNSLINLHDNTAMPWLIGGDFNEILESKEKFGGLPMNNNRADKFANFMHXCSLIDLGYQGSRFTWTNKQRNGVPYTKKWRTILERLDRFLANYDWLNLXPNTTVIHLPRTHSDHCPLLINLEPPQPIQNRIFRFETMWASHPQFQQLVHATWSNDVPLLATTDNFKRVVTRWNQNTFGNIFQQKRKLLARLAGLQSSVHYPTSVFLQNLETQLTLEYSHILRIEEEFWQLKSRINWLNEGDANTRFYHLSTLHRRRRNRINALQDNVGNWVATTXEIHDLIXNYFXDLFQTDQLISENMTGNTYNCEISSDDILXLXSPLHQDEILTALNSFKAYKAPGPDGLHPIFLPKILDGCRIVLRHTKPQDQMGYIQFFYQKYWTDVGDKVSSFCQDVFCSKIIPPELNKTLICLIPKVKHPTRIQQFRPISLCNTVYKLITKIIVNRLKPIISKIIGPTQTSFQQGKRACDNAIIVQESLNYLAKMKGKYPSMLLKLDLEKAFDRLEWSFIRRALFYFNIPPSMISLIMSCVTTTSISILINGSKTQYFTPTRGIRQGDPLSPYLFIMCMELFSRSISLSVDYLKWQPIRLSNKGPLLSHLFFADDIILFSKITTKSCHAIIDVLNNFSKYSGQKINFEKSKLFFSKNCSSLIKILLLLPLTLKKEPLLVNTWDFLCSKQDPKMQISSSSLIISKINLLDKDFVITSFNIKEGTSFGKYLGFPMFQARPKNADFQFLLDNFKNKLAGWKSRFLTLAGRATLIKSTLNQLPNHIMQYIHIPAHILNKMDQYQRNFLWGTTLEKKKLHLVRWNEITRPKEAGGLGIQKLRQKNHALLASLAWRLFKTPQAMWANILLTKYLNTSPNNIHSQIWSNVINGWHQCQLGIKWNIGKGTHIKFWEDPWIGPGTTIRSKIHGPLPLDQQNITISSLINNKGWDWNKLPFELPITLLKVAHNITQIIQATYISKYSNKVDNIFWGLTPTGHFTTRSMYSILEAQHDVSTNSSTKYNWIWKLPVQPKIKGFVWLLHKKRLPTKDYLRHINLIQDATCQFCHQEDETIRHLFLDCTNAKTFWQDLGILDFINQKLHYTNSFNWVHDLITCKDFHFPYQMNPATYLPLSLWNIWLARNNNCYKHTMSTASAKLTTQQAAKFTYLVAKKHTXVKKRQQNLKWKPPKEHFYKLNTDGAHTTSKAGIGGLIRNSKAEWILGFAAAVPXDSSTSAELRALLQGLQLAYSHNLVPLEVEVDSQDIITLLYSNNVSFDNLTTDCRYFLDRLGKPVVLHAYREQNRVADKLAKAGCNFDIHSVVRILEDNPDFAWSVFEQERSAVQGHVLEHFRPHSDNYDTVNRYCNSDAVGSSINIGLYNTLAPTTGASACNRMQYRHPPSVRNT

SEQ ID NO: 3056 - protein, 343 aa, synthetic construct
  source 1..343: note = Description of Artificial Sequence: Synthetic polypeptide
  VARIANT 32: note = Any amino acid
  VARIANT 34: note = Any amino acid
  VARIANT 42: note = Any amino acid
  VARIANT 50: note = Any amino acid
  VARIANT 56: note = Any amino acid
  VARIANT 104: note = Any amino acid
  VARIANT 138: note = Any amino acid
  VARIANT 156: note = Any amino acid
  VARIANT 223: note = Any amino acid
  VARIANT 330: note = Any amino acid
ERKLYNFPNEYRCKNFKYQKDYNNISQEYIMXKXDLYQECRXGSILGKLXALIISXTKLTKIILSQMQKKAFDKIHPFLLKTLKSIRINGSFLKIISSIYLKPXASIICNGINMPFQDGNKDVHYHHYYSILYKCLQXKKKKLKELEAKKKQNYHXLQMIYTRILENQLKNYLKLSTKKLLEIINNFSKVAGYKINPHKSSAFLYITNKTQQQEIEREIPFKXTVDNIKYLGVYLPRQTQELYEHNYKTLFTQIKSDLNNWKNINCSWVGVNIIKMTILPKLIYLFSAIPIKLPKLFYRARKKYQNSSGRTKGQEYQGNKEMLGKVAPPXILNYIIKQQSSKP

SEQ ID NO: 3057 - protein, 935 aa, synthetic construct
  source 1..935: note = Description of Artificial Sequence: Synthetic polypeptide
  VARIANT 204: note = Any amino acid
  VARIANT 212: note = Any amino acid
  VARIANT 894: note = Any amino acid
MIPLTISTWNVLTLIDNTKSSRPERGTALVARELNRYHIQIAALSETRLANEGQLTEVGAGYTFFWSGHSEGECREAGMGFAIKTNLISKLVCLPKGVNDRLMTMLPLAGKHHATIISAYASTMTNPDEVKEKFCEDLETLIINVPKEDKLIILGDFNARVGSNYQTWQGVLGRNGVGNSNSNGHLLLKTCASHDLLITNTVFXLPKCNKTXWIYPRSKHWHLIDYVIVRRRDRQDVRVTKAMCDAECWTDHRLILSKLNIHIHQKYCPQGKMTTRRINVNKLELFSESEQFVADLEGKLSQHIVGNSGAEKEWAAFRDLVYSTAFAHLGQNTHKHQDWFDENDGEIQKLLNEKRELHRIYQQDSSSTSKKAAFNSIKSKVQAKLREMQDSWLSKKADEIQFYADSNNPKCFYDSLKAIYGPKTYGASQLLSADGATLISDKDMILERWAEHFHSVLNRPSSINAEAIDHLPQVEVNPSLAELPTEEEVLRAIRLLSCGKAPGADSIPAEIYKVGGPLLIQKLTEIFQVIWQEEVIPQEFKDASIVHLYKGKGNRLSCDNHRGISLLVIAGKILARVLLNRLILHLEDGHIPESQCGFRKGRGTVNMVFAARQLQEKCQEQNRGLYTTFVDLTKAFDTVSHEGLWKIMSKFGCLEKFINIVHQFHDGMFAWVLDNGQCSRAFPVTSGVKQGCVLAPMLFSMMFSAMLTNAFNEDEHSIKVNYHTDGKFFNLKRLQAKTKVEGVLVHDFLFADDCALNAASEAEMQQSMDQFSAACANFGLIINTKKTQVLHQPPPHHPYVEPSVTTNGEVLNAVDKFTYLGSVLSRDVHIDNEVDTHIARASSVFGRLRRKVWERRGIRLTTKLKVYRAIVLTSLLYACETWTVYQRHARKLNXFHLNCLRKILRITWQDKVPDTEVLAQAELPSIQTMLQRVQL

SEQ ID NO: 3058 - protein, 867 aa, synthetic construct
  source 1..867: note = Description of Artificial Sequence: Synthetic polypeptide
CLPPSLLVSLSSFELELFELGCSPPVLCAVVYRPPKYNKDFLNEFSGLLAEILLKYDRVLIVGDFNIHVCCPDHTMSKDFLSLIDSFNLVQHVSEPTQERGHTLDLVLTYGLSVSNLVICDAVFSDHMPVLFDITLPCSPCRPRAPARWVRIINPSTAALFSASFNQTSVIPQSTCSSTDELSSWLHSTCLTVLDAVAPLKSRQPKVKTEPWLNNVTRAARRECRKAERKFKKDKLQVSLQMLKDSWRHYQATVKEAKREHLSNVILLNRHKPRVLFSTIDAALNAPKSVCVQPTLETCETFLKFFVDKVNNVRALISPPGFDPSVVVSCPVTFDQFEPVTLSVLYETVKHLKPSGSPSDAVPPRLFKEVITTLGPAVLAVVNGSLSSGVFPRNCKHATVQPLIKKPNLDPSVLSNFRPISKLPFLSKILEKIVYVQLKDFLDENGNLEVFQSGFKSLHSTESALLRVFNDILLATDAGDHVVLVLLDLTAAFDTLDHNILISRLQQLVGIRGTALQWFRSYLEDRTFCVNLNNVQSSSAPLLYGVPQGSVLGPLLFSLYLLPLGSILRKHNCAFHCYADDTQIYVPITKKDAHSISPLIKCLEELKIWMALNFLHLNEEKTEVIVFGPSGNSESHPSHTLVTPESHPIALGSLTQSVKSTVTNLGVKMDNGFNLDKQISSVVRSSFFQLRQLAKVKSFLSRKHFETVIHAFVTTRLDYCNSLYFGAPHSSLSRLQLVQNAAARLLTGTWKREHITPVLASLHWLPVHFRVRFKILLFVFKSLNGLAPPYLSELLHLHSPSRSLRSADQLLLDVPRTRRKLRGDRAFAVAGPSLWNALPMQVRQARSLNDFKSKLKTHLFSLAFNSV

SEQ ID NO: 3059 - protein, 588 aa, synthetic construct
  source 1..588: note = Description of Artificial Sequence: Synthetic polypeptide
  VARIANT 308: note = Any amino acid
  VARIANT 585: note = Any amino acid
MRGSAGRKANTNWLRPLKEAPKPEEAASTTTPPPSFNMALFNVRSLSNKTFIINDFIHDYNIDGLFLTETWLSTDASTVLTEASPPNFSFVFSTREGKKGGGTASIMSNSFAVKQITLDEYPSFEHHAFVFNSPPVLCITVYRPPKPSSVFIEEFSEFLASVHTSFNMILITGDFNLHIDGKSDYCTTQFLDLLSSLDFKQHVMQPTHNRGHTLDLVISHGLPTSVSAVVDLAVSDHYCVLFNITGFIKQETSVRTVKKRYLTPEVVEKFITSVRSYSPPVLPAPCDLLVESFNSKLKSSLDSVAPLXSKKIRIKATPPWRTEEIKQLKRRCRSAERLWRKHKLEINYQLYQNQLKLYNQTVKQTRNSYFANIISVNKNNPRVLFTTIESLINSNVNKNTMPASASLCEDFADHFRSKIDSVRSNIIKGQKSLFIGNDGLILPEEALDSFDLVEAATLGRVFSQVNPTTCFLDPIPTSLFKSFYGSFESEILNIMNSSLQTGIFPAAFKTAVVKPLLKKTNLDPSVFNNYRPVSNLPFLSKVLEKLVFIQLNEFLLQNNIFEINQSGFRTNHSTETALLKIVNDXRCA

SEQ ID NO: 3060 - protein, 304 aa, synthetic construct
  source 1..304: note = Description of Artificial Sequence: Synthetic polypeptide
TYVRSAAGDSDRFGVSVGLHQGSALSPYLFLLVMDALTLNIQEEAPWCMLYADDIVLVGEDECEVQSRLEEWRVKLEGAGLKISRTKTEHLFCDFGGPTSFSPIALNGVPLPTCSDFKYLGSLVQSDGGVDRDVKSRINAGWMKWRQVTGVTCDPRMPLRLKGQIYKSIIRPVVLYGSECWATKVADERRLHVAEMRMLRWMCGVTRLDKVKNVYIRGSLKVAPVVEKLRSKRLAWYGHIMRRNDGDINQKVLRLNVDGYKGRGRPKKVWMDCVKEDMLKKGVDSDMTADRDVWKSSTYCADPP

SEQ ID NO: 3061 - protein, 1011 aa, synthetic construct
  source 1..1011: note = Description of Artificial Sequence: Synthetic polypeptide
  VARIANT 715: note = Any amino acid
  VARIANT 846: note = Any amino acid
MMATRKVRPPVPGGPAVPGYGSGQGNGGAGGAKNPRLGYGYHTRRPLALATLNTRTLRTDERIAELEEELSRLRWDIIGLSEVRREGEETIILKSGNLFFFREGDQQSQGGVGFIVHKSLVNNVVKIESVSTRVAYLILRISKRYSLKVIQVYAPTSTHSDDEVETMYEDISRAMHSSKTFYTVVMGDFNAKLGIRDGDELRMGKFGYGRRNHRGHLLAGFMEKEGLYMMNSFFKKQGHRKWTWMSPDGATKNEIDFIMSTKKQIFNDVSVINAVKTGSDHRIVRGTLNIDVKLERCRLMGSTLRPAPVHIHNAETFQLELRNQFECLGSSVDDLNDGFVHALQSVGSKFYKTHRKSSPKKLSDHTLELMKERRDMKLHSSDDAERYRRLNRQISTSIKRDIRRFNTNRVKLAIERNQGSKVFSRDLSIGQSQLLKLKTGEGRVVSSRPELLSEVERFYGQLYATQEPVTDLVEDPRARLTRHYTEDIPDVSLDEISMALKQLKNNKAPGNDGITAELLRAAGEPALKVLQKLFNSVILEGHTPKAWSRSVVVLFFKKGDKALLKNYRPISLLSHVYKLFSRVITNRLARRFDDFQPPEQAGFRKGFSTVDHIHTLRQVIQKTEEYNLPLCLAFVDYEKAFDSVETWAVLQSLQRCRIDYRYIEALRCLYENATMSVRVQSEDTKPIHLQRGVRQGDVISPKLFTAALEDVFKVXKYCHLPETLHRGVGRRFQGPEILVVTYTFLHVTFRVQVIGSLLLLRILIKIGTMLEDLNRASERVGLRMNMDKTKVMSNVHVSPTPITIGGHTLEVVDEYVYLGQTIQLGRSNFEREVNRRIRLGWAIAKXNNRRSGSCGISSRPKTYRSVSRQKSLTSVCCQHTGQRRGHSLRATSGGSKSLKGQWSGQCSESLCEIASGTMRSAAESVTDIARRIANLKWRWAGHIARRTDGRWGRRVLEWRPRIGRRSVGRPPARWTDDLVKVAGVHWMRAAQDRALWQSMGEAYVQQWTTYG

SEQ ID NO: 3062 - protein, 310 aa, synthetic construct
  source 1..310: note = Description of Artificial Sequence: Synthetic polypeptide
  VARIANT 28: note = Any amino acid
KSEHSRQVRSRRNRQVQCGCGPAPGIGXSPYLFLLVIDALTVEIQEEAPWCMLFADDIVLVGEDALEVQSRLERWRDKLETAGLKISRAKTEQLFCDFGGLSSFIPIALDGAHLPVCSDFRYLGSLIQSDGYIDRDVTNRIKAGWMKWRQVTGVICDPQIPLKLKGKIYKAVVRPVMMYGSECWAVKGTDERRLHVTEMRMLRWMCGVTRMDKIRNEYIRGSLRVAPIVEKVRSKRLAWYGHVMRRDESHVTRRTLVMSVEGYIGRGRPRKRWMDCVKGDMIKKGVMTEMTYDRVMWRTKTCCADPTGVG

SEQ ID NO: 3063 - protein, 1024 aa, synthetic construct
  source 1..1024: note = Description of Artificial Sequence: Synthetic polypeptide
MMRPRSSSLSLTKPNQIKQLNTSNQKRNNPNPAGHRGVARPLPPKSMSSGSKLKSKLYLATLNVRTLMEDHRLIELEHAISQIKWDIIGLCEVRRSGDEIREYNKYIFYYKGEKKGRRGIGFLINKYLKDKIISFEGISDRIAVLNILNGFKHPMSIIQAYAPTEQDTNAEKDKFYEKLTEVIQKSNKNIIVMGDFNAKTGVKSNKDEFVLGKNSCGERNENGQRLIDLCFASNLKIANSFYKKEKSSGRGCLQTEGTEMKLISFQFLQKRKVKWTWMSPNGRNRNEIDFILTRETRILSDVSVINKLNFSTDHRMLRGTLICEDKNSRKHIISNKNGKTITVPHNILEDIEKTLQDIKKQQTIQDKYDFLEKTLKEVNIFGTKRGKRNKLNEETKKILEERNELLDNRRENRHSIANISKKIQSSIRKHRKEERLKTLKEQIEKTGGMTKGLKQLKEYSQWIPNIKLQKKKETYRITSRRSSIAKTATEFYKQLYTESGESIVASKNIIEEGDSNEEEIPTILETEVAGAIRSQKNDKAPGDDKIPNELLKSTLSSITKALTILFNEIINSEQIPVQWTKSTITLLHKKGDKQDINNYRPISLMSNIYKVFSKVILGRVTQTLDANQPREQAGFRADYSTMDHINVVKQIIEKCNEYGQNYYLAFVDYSKAFDSLSHNYIWKTLASQGIERKYINIIKEIYKNSTAKIQLEQVGEEFKIERGVRQRDPLSPKIFTAVLENIFRNIDWDKFGININGTKLNHLRFADGIVLFAETPETLRTMLQQLDQESRRAGLSMNPMKTKLMTNAEKDIIELRHEIIEYVDEYIYLGQIISVNQHSKEIDRRISNAWKRYWSLKEVVKKKSIPMSIKTKLYNTCILPCLTYGCQTWPSTTKHNLKLANCQRHMERSMLDIKLRNRWRNVTIREKNKSKEKKTKVNDVFKKIKKLKWNWTGHIIRTNKGKWTKDIMDWYPREGKRQRGRQIKRWEDDLPKGWRRLARDRETWKKLGEAYVEGQPDTQLDAGK

SEQ ID NO: 3064 - protein, 1446 aa, synthetic construct
  source 1..1446: note = Description of Artificial Sequence: Synthetic polypeptide
  VARIANT 860: note = Any amino acid
MGGNKKGRNKTQFKPVILNSTDDLDQELEPQETRGVNECTLCLTSKQSKMIQCVLCEENNFHASCLALNQSGRYHAPVCPSGHGCSVNERSTEKQHWVCTGCRGPTTNATPKVACTKCEFLFCAPCAKLRPGMIDMFNRFPKSFMWNCERCLQVSTQNRKCVASDTKESVGESPKTAGEEPLQKYAETGDHDVKEISYEIAQSTVQKRSSSGGDWISKNEKKPRICKYYAKNQCKYGISGRGCKFFHPKRCPRFMKYGRQGCNSKRECNFFHPWLCQESFRNGTCFDTTCPEIHLKGTIRAAPTAHHRHTHAERGENSGRPWQNSNRIQTNKYGENNHQYNVERDITANDRDMSVYNQDVRRDLQNMQNFLQTLYEKISSMETYMEKVQHGGPRAPWNPPRVENPTQLWGDPGTTHQLKTQTAIHHAKQNEHQELKSNKDEILSKVHVINIRGLLTKNCRKQMVLQDIINDAGSKLLAVTETHLDDAVNDAEVKIENYVLHRSDRKDRKCGGVALYVRDHLGSHTKQKFSNGVCDCIIVNIEKLRLMCVVCYRPPKCTTEKFAEMLQVINTHCKEVQSKYQLYITGDFNFPFLKWLTTDLPDETGSFVLSRTSSATRDEKDQALSLVRIMEEFSLTQMISSPTRNENVLDLLFVDNAQLIKNIEIQDTTLSDHRLVEITTQLGERDSHRPQKNSQINSISSLRDLNVHDKGINWDGLNAELQSVNWDVLLNNSIESESINETFENILLEKCMKYLSPAKRKFNKSRHHKFRKGLLKKRAKLIKCQQSTKLLQRKSECKKKLDEIERQLARSHDEEKQEKEKKAIEKIKSNSKYFFAYASHHSSVKSKIGPLVNDTGSIVXDDQEMSEILSRQYQKVFSDKIPNPEIPRIDLTTNYLTDFEFTKLSIELAIDELSGNSAAGPDDVPAKILKMCKLSISYPLYLMWRKSMDDGVVPLTYKHAIISPIPKAGNSMDPANYRPVSLTSHVVKTFERVFRKHLVHHLESNNLLTSNQHGFRHKRSTTSQLLEHYDSILDLLCQGKSVDVIYLDFAKAFDKVDHGILLLKLFNMGIRGKCLRWIEAFLTNRTQSVIINNKVSKRQPVLSGVPQGTVLGPILFLIMINDMGHQCKFAVPSSFADDTRILAAVQSTADVRNVQLDLTNIFHWTSVNNMTFNESKFELLRYGKNFSLTESTSYTTRDGSEIERKQILRDLGVRIQDNATFEDHVARVVTVGKKWSGWVLRTFSSREADTMLTLWKQLILPRIEYCSPLWMPSKRKDLERLEAIQRSFTAKIRGMKDLNYHERLAQLQMYSIQRRFERFTIIYVWKILEGITVNVNGRIQARHSNRIGRTCEVRIPIKTGGDAIATKYSNSFVVRGARLFNKMPRHIRNVTGTETAKFKHLLDACLLKVPDKPAVSGYVNCGDNSLLATPLVTDCSITSAQDGWRA

SEQ ID NO: 3065 - protein, 931 aa, synthetic construct
  source 1..931: note = Description of Artificial Sequence: Synthetic polypeptide
MVYVYLLFFACLITRYPDVEENPGPRGFGSRSCRILCTNVRGLYGNLAELAVASSNYDLVLCSETLVSSHRHVSELMIPNFEKPVLRLRDSCPGFRGLAAYVRKGVVVSRQSEYECPCCEMMVLRVCGSFRNFYLFSVYRSPSADDRVFDCLLDAMARIQSSDRRSAFAFMGDFNCHHVEWLGSGRTDCHGHAAFDFASASGCEQLVEGPTHLMGGVLDLLMTDVSDLVGVSVVSPIGSSDHGALSATLQVRQRVPRVTVRREIFLKSRVNWDAVSGAILALPWGVVRESTDPGSTLDRLLSDMVRAYVPSRFITVRTGDEPWFDDACRRAHQLKREAYARWRTSRSAVDFQLFREQRRRAGATYEEAEREHNLRSRELLASSVSAHKWWSTLKSAVLGVSSSVPPLIGTGGDLVADPAAKADLLLRYFDGKQSRDRVRIPLACDPEPRFSGFAFRSSEVHRLLLDLDPYGGTDPSGMFPFFLRRVAGVLAAPLASVFRRMLRLGSFPECWRVAHVTPVPKGSVSSRTSDYRPISITPVLSKVYERLVASRLGCFLEKQGVLPPTQYGFRKGLGTCDALLHISHVLQLALDGGHEARLVQLDFSAAFDRVNHLGLLHKLRLMGIGGSVLAVISQFLSDRRQCVVVDGKRSEFLDLVSGVPQGSVLGPLLFIVYTADLFHLVNNLLVGYADDVTLLAVCDKPSDRLEVSESIQHDLEMIDSWCSRWGMRLNAGKTKTMLVSRSRTVGPPFPALMLDGVSLPVVDDLVILGVNFDPKLTFEPHIRSVASRASQKIGLMRRAWRVFGSVELTRRCFNCFVLPLLEYCSVVWGSAADCHLCLLDKVVRRCAFMLGGVVPCDLAHRRRVGGVCFLYKIYNCPSHPLSEFLPDPFVRVRYTRRTGALHEFALEPLRCRTGQYSRSFFSIVCGCLEWS

SEQ ID NO: 3066 - protein, 1669 aa, synthetic construct
  source 1..1669: note = Description of Artificial Sequence: Synthetic polypeptide
  VARIANT 285: note = Any amino acid
  VARIANT 578: note = Any amino acid
  VARIANT 1033: note = Any amino acid
MKQCDECHSVFPLEFFYYEEVELESCKYCCKIQALQAEIEKLESDREAMQRGDGGEKEKAPREAHLRLSSPSPWKTVMRNKRQRRSTGAILEQTNHIKVNNRFAAFNDGDDNVATSVRPKIKLKTVNGEQHRGPPQSRDQKKSETSVQPPSHERERNPAPIPGQRAIKTFLIGDQIIKGQYYAFKRGCNDRKVICRPQASTSDATAILKDLRCKKMDHVIIHVGTNDLRTYSETQLQLVKDLIAAAKKKSDHVTLTSILPRLRAGNRLYSRIRYINGQIKREAEXNGLEFIDLFPSFDDDWRLFLPDGVNLNGAGHHVLGEMLLAAAASETAALEEGLRTRPKTIIEQPRHPAPFHALPADLPAMEQTATNVPAAVPCNPQISSPSGMKVGDPKGNEGTIITNSLDTDEEEITPTPDASVQMSRLGPPPLLPSIVSNLVSTNSNMSEGTDVPQPTNARQTDLDSSNTERGSPVSVSKEKSQSQTPVAKKRGQFPRTSSIPAHEGNRSTRKSGARNIPPKTNSCQPPQTRITRSKANSAGNDLLSARLGGKRPIVRQIAADVKQSDNCQAEIQNISLAXLQTGALAATDNAFADLTPPIFSQQSDAPSVSVTRRSNANTSVKFLFGNVQSITNKMNELQAIAATLAYDVIALNETWINLSNKNLEAEVALKGYKLFNIDRPTETGRGGGSIIYIKEHLNPLCKGFAATKEYEFITTHARLGIRQSLNIMLAYRSPRSTAETDAALYNKIENALNTPNETILMGDFNLPQIDWSTLCSPAPGSKLLELLSHHHLTQHVNEPTRYGNILDLVFSTPDCEIVDLAILDRLGDHNMIEFTLKTGNEFTTNASRLKLPDYRRANFQGMATEIETTDFETPMRDASVEQCSHILKTSILRAAERYIPNKRVRISNDPLWMNRTVKRCIAGDKCVTKPGSVIQQRRTGPVTSPLDESDSQTLHCRRQVRYKAWKRNPTEENRSSHIRACRDVKKIVRTTKREKEVSVAAMAKRNPKAFYKYVNERRLKKETIGPLKRPDGXITNDLRDKATILNDYFTSVFTVENVTNIPEPAPMQVAPINTCVFTEIEILQELTHLNVYKSTGPDNLTPRVLREMAPVIVKPLLEIFNRSLRTGEVPQDWKLANVIPIHKKGDKKSPSNYRPISLTSVVSKTIERLLKKRITDHLRMHQLISDTQHGFRNGRSCLTNLLDFFSKVTDIKDEEKGVDLVYLDFQKAFDKVPHQRLMKKLEAHGIQGDYLRWIRAWLTGRQQRVKLEGETSDWTQVSSGVPQGSVLGPLLFSIYINDLDLNIRSKISKFADDTKLCHPATKRAELQQDLDHLMEWSTTWQMSFNVDKCSVMHVGLVNPSTPLKMNGTELAAVTQQRDLGITITNKLQHSQQVDKSVKMASRVLGFITRNFEYKSKDIIVPLYKALVRPHLEFAVQFWSPHLCKDIDNMERVQRRATKLIPQLRNKPYECRLKELGLISLEQRRLRGQLIETFKYLNGFNDVPTTGLFERDLNDRLRNNGQKLKHKARRTTLSQQFFPYFIVSIWNRLPSDVVSAESVNAFKNRLDIHWERHPPQLRTPPPGVASSELLLQESQALNGQSFRGHLNPSSSLSRSNYTSLSSAYQRLLIVLACIHDRLFGWDSSPPSFSFFFLFLPFFSSLSPVLYILLT

SEQ ID NO: 3067 - protein, 1092 aa, synthetic construct
  source 1..1092: note = Description of Artificial Sequence: Synthetic polypeptide
  VARIANT 894: note = Any amino acid
MPCSGLFSAASYHPDWRCPSCAPQPPRPPSPPPASPLSPHPTNAPPLIVMQFNCNGLLHCRSELSAFLHSSNIAIAALQETKLTPSSSLPVFPGYTPVRKDRPAANGGGGLLFLIRQDIPYQQATTNHLFPNDHTVEHSGVTVTLCSSSLTLINIYVPPATSCPPGYRLDSSALFADSSADTLIMGDFNAHNTDWYSVTQDARAAARGEEISASINNGPYCLLNGDSPTRVPRDGPGSSPDLTVISAHLALDYSWSTTTTLSSDHLPILITAESSDSAPSGPRRTFVNFRKANWEEFTRECEELITSLPLPSSCSGGLRALNRALLSAAKHHIPAGHRKEYIPRLTPDARDAISRRDHLRSTSPHDPSLPQLQQEVDRLICGAAQEAWKQTIQDCDPKSNPSKFWSLLRSLSGKQSSVPRNQPISFGTHTFTHNGDIARGFCKQFTATSPPALATPPRLARRLLRKRHPIAHGFSPFTPAQVREAIVASGSSTAVGPDQLSILHLRHLGPQGIIYLTRLYNLSLAHADIPALWKLAVIIAILKPSKPADKGSSYRPISLLCPAAKVLERLLLPFINEAYQPAPHQHGFRPMHSTTSALLPLAFQATRGMNKPKPHDRTVALLIDFSKAFDTVPTEGLLSSVSGTTLHHNVVRWLAAYLRGRAACCLYNGSRSQFRAVKAGVPQGSVVSPSLFNLYVSDFPIPRDQLCYPSVTSYADDFTVVASHRDPLTAAAALSDHSASVSNWAANKGLTISTSKSNSTLWTTDTHQSTLDPGITMNDSALPLERRPKILGVTFDTHFTFTPHITSTAARASSRLRLLKALAGTRWGQCKETLLLTYRAFVRPLITYAAPVWYPGARQSAVRKLQTVQNAALRTATGCLRMASVDHLHAESKXLRIDQSLDLQCRQYLVSALRPEHPAHSVVTAQAGPRLIRHNLATKFQPDINHLLTDNIMPSPEYRSAISSLHRSAVQASLDRLPVNRVLGFAPPEISPDEAVLSRAARSTLSQLRSGFCSALMSYRHRIGLADSDSCPECHRAPHTVNHLFECPAHPTALLPTSLWDSPLSVTDFLCSLPSFSYLPPHARPPPEPPPT

SEQ ID NO: 3068 - protein, 943 aa, synthetic construct
  source 1..943: note = Description of Artificial Sequence: Synthetic polypeptide
MHRARSEKGGPQFRMEKIVQSTGYLKCLYTNARSLGNKQEELEALAQAKKYDLIGITETWWDDSHDWSAVMEGYRLFRKNRQGRKGGGVALYVREHYDCSELQYKEGEKLVESLWVRFKGANSSDVVVGVCYRPPNQVDEVDEAFFEQLSEASRSQALVLVGDFNHPDICWETNTAVHRQSRKFLENVGDNFLVQVLKDPTRGRAQLDLLLTNREELIGDVEVGDNLGSSDHEMVDFRILTKGRKESSKIHTLDFKKADFDSLRDLMERIPWDVNMKGKGVQDSWQYFKEALLKAQKETIPTRSKRGKPGRRPDWLTGEILGVLKHKKEAYRKWKLGQMTREELKCIVRECRGVIRKAKAQMELRLAKDVKDNKKGFYRHVNKKKVIREGVQSLMDEGGNLVTEDVGKAEVLNAFFASVFTDKVGSWTSVLSDARWEEDGQPLVGKEQVRNYLEKLNVHKSMGPDLMHPRVLKELANVIEEPLAIIFEKSWRSGEIPDDWKKANVVPIFKKGKKDDPGNYRPVSLTSVPGKIMEGIIKESILRHLNERKVIRNSQHGFTKGKSCLTNLISFYDEVTGSVDMGKSVDVIYLDFSKAFDTVSHNILASKLRECGLDKWTVRWIERWLEGRAQRVVINGSMSGWRSVSSGVPQGSVLGPVLFNIFINDLDEGIDCTLSKFADDTKLGGEVDTLKGRDRVQSDLDKLEDWATRNLMRFNKDKCRVLHLGRKNPKHSYRLGTNQLSSSSAEKDLGVTVDEKLDMSQQCALVAKKANGILGCIKRSIASRSRDVIIPLYSALVRPHLEYCVQFWAPHYKKDADALERVQRRATKMIRGLEHMTYEERLRDLGLFSLQKRRVRGDLIAAFNFLKGGSKEDGERLFSVVTDGRTRSNGLKLWWERSRLDIRKNYFTRRVVKHWNGLPREVVESPSLEVFKSRLDKALAGLI

SEQ ID NO: 3069 - protein, 1049 aa, synthetic construct
  source 1..1049: note = Description of Artificial Sequence: Synthetic polypeptide
MIPGLTEDLRSISNPRKTAVINNELRRLRMDIVALQETRLSSSGCLREKDFSFFWHGKPPEETREHGVGFAIRNNLVGSVIPPNVGTERMLKIQLQTSVGMANIFSVYAPTLTSAQEDKDKFYDELSIAISEVSSHEPLFILGDFNARVGSDHHSWPSCLGQFGTGKMNENGQRLLELCSQHDLCVTNTFFNVKPQHKVSWRHPRSKHWHQLDLVLTKRSRLGSVRVTRSYHSADCDTDHLLVCSKVYIQPRRFFRSRKEGRPRIDTGKTRDPSKVCEFVQALEEALPRRDDTDISKRWEQLRDAIYDTAISIFGKKTVKSADWFEAHTEVLTPLIEKKRQALAAYRSSPSEENLQALRFARSQVQQVARRCANDYWLQLCSKIQQAADTGNMRGMYDGIKQVIGPSQRKTAPLKSATGEVLKDRTKQMERWVEYYSQLYARETVVTERALNAIEPLPTMTELDAEPTMEELSDALKALSSGKAPGKDGIPSEILKCANGTLVSELYGILCQCWREGSVPQDMRDANIVTVYKNKGDKSDCNNYRGISLLSTVGKLFARVVLKRLHVLAERVYPESQCGFRAERSTIDMVFSVRQLQEKCREQNKPLYIAFIDLTKAFDLVSRKGLFAILAKIGCPPTLLSIVRAFHDGMRGTIVYDGSTSEPFEILSGVKQGCVLAPTLFGIFFAVLLKYAFGTATEGIFLRTRTDGNLFKLSRLRAKTRVLTKRLREFLFADDAAIAAHTLQELQSLITRFADACMEFGLTISLKKTQVMGQSVGNEPFISVLDYELEVVHEFVYLGSTISDNLSFDSEINKRIGKAATTFSRLTKRVWANNKLTVHTKVQVYTACVLSTLLYASETWTLCSKQEQRLNTFHMRCLRRILGISWQDKIPNSAVLERAGTVSMFTLLKQRRMRWLGHVSRMLDGRIPKDLLFGELASGKRPKGRPKLRYKDTCKRDLSALSISANTWHSLALDKYAWKQGVKEALAMYETTLVKEAEDKRALRKIRARDTRATSAYCCSQCGKDCHSRIGLHSHRRRCSNQSNRGANP

SEQ ID NO: 3070 - protein, 841 aa, synthetic construct
  source 1..841: note = Description of Artificial Sequence: Synthetic polypeptide
MLLVYRPPRCTADALLELADVVSDVALRTPRLLVLGDFNIHAEAVLSGPARDFMDTMTTLGLSQEITAPTHVAGHTLDLVFWTKGDRVLGIRDVATLPLSWTDHYLVKFRLSADLPLHRGGGPIKMIRPQRLMDPEGFLRSLRDCSAIMANGPVDALVDTWNTEVARAVDMIAPKRPLRASRAKFAPWFSGELMAAKRSVRRLERRWRRTRAESDRLRVRAELRAYSVAVLTAKKSYFSTRIASAQCRPAELFRVVRGLLQSGTRDEMEEPLAPRCDLFAKHFADKIARIRLDLDSGCCVSGAQNVLSAPPSLFSLDQFQLLQTEDVDKVLGGVRPTTCSLDPCPSWLIKSSREGMTGWVQGIINASFRSGMVPAALKEAVIKPLLKKPSLDPRDLNNYRPVANIPFLGKVLERAVALQLQAFLEETDYLDPFQSGFRPGFGTETALVALVDDLRREIDRGSASLLILLDLSAAFDTIDHGILLERLAELGIGGTVLQWFRSYLSGRFQKVELGGCYSTPWRLCYGVPQGSILSPMLFNIYMKPLGEVIRSFGGRCHQYADDTQLYFPVTSEPGVAATDLNRCLEAVMDWMKSNKLKLNPDKTEVLWIRRPSVRECGVVPVLDGVTLPLKEQVRSLGVLLDPFLTFENQISSVARSAFGQLRLIRQLRPFLNKHDLATVIHALVTSRLDYCNALYVGLPLKSLRKLQLVQNAAARVLTNTRYTEHIMPVLRQLHWLPVCFRAQFKVLVMTYKALNGLGPGYLKDRLLPYEPARGLRSAGEALLRVPPLMEIRLTSTRSRAFSAFAPRLWNSLPRDIRMAPTLALFRRQAKATLFTRAFIGV

SEQ ID NO: 3071 - protein, 815 aa, synthetic construct
  source 1..815: note = Description of Artificial Sequence: Synthetic polypeptide
  VARIANT 31: note = Any amino acid
YLRDFTEKPKSMNPCSHESFKSRINALYGEXFHLSVRAFNRQRDKKSQLIETLTFLKRCRDNKVIPIAFTLTSAAVSSPNSKRILFNASLSLISERIRVLRFELDSLDKTLLQSHLMLTQKMSPSDWNHVDNMTAASADSLSAKCKANLIAKFNLLSKKKPEPHITKLDVNKIVINQSNIPISDNLKTVLAKGLNFAVTPKHIPVEDIISQVDVALKGIGHIQADVARAEIATILKNAKKPISNISKNERSELANLKKRDDIVILSADKGNATVIMDKNSYNNKIQDLLNDGSYSKIKSDPTNSLTIKTNKIITSSTSLIEPTKRPSLKPSAARPPRFYGLPKIHKEGTPLRPIVSTINSPTYKLARFLSDTLLPFTGKTTSAVLNSTQLVSMVKDIVLSPDDILVSFDVVSLFTKVPVPDTITIIEDLVQHGLNPDVPALVRHCLTNTYFTWNGTFYKQNEGTPMGSPLSPVIANVFMEKFESDAIQTSTLRPSLWKRYVDDTFVIWPHGLPALNHFLDHINSRHPSIKFTMEVEKDGKLPFLDVLFERRTDGSLGHSVYRKSTHTDSYLKPDSHHHPAQKNSLIKTLYHRAHCISDQHHLASELKHVHLALKMNGYSDRTIRQAVSPTIQKQPPDTPIKIITLPYIAGVTKKISKILNKHKDPGPVQYSTQNPTNTKIQVRFNTVHKIRDLIPSVKDVIPDLQYPGVYKLSCTCGDCYIGETKRHISDRIREHKSDLKHGRTNSSAVADHCFNTAGSHDIVFSDTKVLCKPPGYYQRFVHEAIQIYKHRHNFNREDGFKLSNHWKDVINQVKL

SEQ ID NO: 3072 - protein, 490 aa, synthetic construct
  source 1..490: note = Description of Artificial Sequence: Synthetic polypeptide
  VARIANT 93: note = Any amino acid
IHKEGTPLRPIVSTINSPTYKLTRFLSETLLPFTGKTTSAVLNSAHLVSLIKDISLSPGDLLVSFDVVSLFTKVPVPDTIAIIEDLVQQGLNXDVPTLALPYQHLLHLEWYILQTRGGYPQWVLPYRQWCANFGTALPTLTSPGMVHSTNKRRVPPMGSPLSPVVANVFMEKFETDAIQTSTLRPSLWKRYVDDTFVIWPHGQPALNQFFNHINSIHPAIKFTMEVEKDGKLPFLDVLIEKRPDGSLGHSVYRKATHTDAYLKPDSHHHPAQKNSLIKTLHHRAHCISDQHHLASELEHVHQALRMNGYSDRTIRKAVSPAMGRQPSEDPIKTITLPYIAGVTKNISKILNKHKIQVRFNTVHKIRDLIPSVKDVIPDMQYPGVYKLSCGCGSSYIGETKRHVSDRVREHKADLKHGRTNTSAVADHCFNAVGTHEIDFSKTKVLCKPTGYHQRFVHEAIQIYKHRHNFNREDGYKLSNHWKDVINQVKS

SEQ ID NO: 3073 - protein, 521 aa, synthetic construct
  source 1..521: note = Description of Artificial Sequence: Synthetic polypeptide
  VARIANT 376: note = Any amino acid
QPPGYENQQYITDSTSLIEPTKRLSLKPSAARPPRFYGLPKIHKDGTPLRPIVSTIDSPTYKLARFLSETLLPFTGKTTSAVLNSAHLVSLIKDISLSPGDLLVSFDVVYLFTKVPVPDTIAIIEDLVQQGLNADVPALVRHCLTNTYFTWNGTFYKQVEGTPMGSPLSPVVANVFMEKFETDAIQASILRPSLWKRYVDDTFVIWPHGLPALNQFFNHINSIHPAIKFTMEVEKDGKLPFLDVLIEKRPDGSLGHCLQESHPHGCLSKTSKRDQMAHWDTVYRKATHTDAYLKPDSHHHPAQKNSLIKTLHHRARCISDHHHLASELEHVHQALKMNGYSDCTIRKAVTPTVGREPPEDPIKTITLPYIAGVTKXISKIMSKHKIQVRFNTVHKIRDLIPSVKDVIPDMQYPGVYKLSCACGSSYIGETKRHVSDRVREHKADLKHGRTNTSAVADHCFNAVGTHEIDFSKTKVLCKPTGYQQRFVHEAIQIYKHRHNFNREDGYKLSNHWKDVINQVKS

SEQ ID NO: 3074 - protein, 980 aa, synthetic construct
  source 1..980: note = Description of Artificial Sequence: Synthetic polypeptide
MAAHTVAAAQCLPGRCLVWLFMYALCLVLCTFCRASNTFSRHDLLKIGLCYERSVTSEFLRLHKIPVELARSPGSPWIIIPAGRRRRRRRERRQKRGCRAGALARLRRQPLKPPLPSLFLTNARSLANKMDELRLQTTANNVVKDSCILLFTETWLHSSIPDSAIELAGYTAQRHDRTVDSGKSRGGGLCVYVNNSWCTNTVTVDSHCSPDLEYVTVKCRPIYLPREFTVVMITAVYIPPDANANSAIGLLHGSISIQQSKYPDAVQIIAGDFNHADLKAALPKFHQHVKCATRGTKTLDKVYTNIKLGYRARPLPHLGQSDHLSLLLIPAYAPIKKTAPTITKTVATWPEGATQQLQDCFDRTNWGVFEHQDLEVFTDSVLCYIKNCIDTVTVDKRIRVYPNQKPWMTREVQQLLKERNIAFKSRDKALYSTARANLKRGIREAKADYRRRIEERLDSNDSRQVWQGVQHLTNYRANLGAADGDTALAEELNLFFARFEVTPPGTASPNPTVHSSLNLTVEEHEVRRTLRAVNPRKAAGPDGVPGRVLRDCADELAGVFTRIFNLSLEQSTVPPCLKSSTIVPLPKKTHISSLNDYRPVALTPVVMKCFEKLVRSHIIATLPRSLDPHQFAYRANRSTEDAVATALHAALSHLEQQGSYVRMLFVDYSSAFNTILPHKLVVKLGDLGLPHSTCMWIHSFLSGRRQRVRVGRHTSTALSLSTGSPQGCVLSPLLYSLYTHDCAPVHHSNTIVKFADDTTVVGLISGGDESAYRDEVERLTAWCRGNNLLLNTAKTKELIIDYRRKKTDTPPLTINGDCVERVADFRFLGVHIGEGLTWSANTSELLKKAQQRLYFLRILRKNNITQKLLVSFYRASIESILTYCICVWYTSCTVAQRKALQRVINTAQKIAGCPLPTLEELHSSRCIKKAQNIIKDSSHPGHSLFELLPSGRRFRSVKTRTNRFKHSFYPTAITTLNTAN

SEQ ID NO: 3075 - protein, 521 aa, synthetic construct
  source 1..521: note = Description of Artificial Sequence: Synthetic polypeptide
  VARIANT 6: note = Any amino acid
  VARIANT 9: note = Any amino acid
  VARIANT 11: note = Ile or Leu
  VARIANT 15: note = Any amino acid
  VARIANT 31: note = Any amino acid
  VARIANT 63: note = Any amino acid
  VARIANT 88: note = Any amino acid
  VARIANT 89: note = Any amino acid
  VARIANT 106: note = Any amino acid
  VARIANT 126: note = Any amino acid
  VARIANT 166: note = Any amino acid
TTYNNXIQXLXNDGXYTKINRDPTNRLATKXNNIITNSTSLIDSNKQRSLKPSAARPPRFYGXPKIHKEGTPLRPIVSTINSPTYKLXXFLPETLLPFTGKTTSAXLNSAHLVSLIKDISLSPDDXLVSFDVVSLFTKVPVPDTIAIIEDLVQQGLNPDVPTLVRXCLTNTYFTWNGTFYKQNEGTPMGSPLSPVVANVFMEKFETDAIQTSTLRPSLWKRYVDDTFVIWPHGLPALNQFLNHINSIHPSIKFTMEVEKDGKLPFLDVLIEKRPDGSLGHSVYRKATHTDAYLKPDSHHHPAQKNSLIKTLHHRARCISDQHHLASELEHVHQALRMNGYSDRTIRKAVSPAMGRQPSEDPTNTITLPYIAGVTKKISKILNKHKIQVRFNTVHKIRDLIPSVKDVIPDMQYPGVYKLSCGCGSSYIGETKRHVSDRVREHKADLKHGRTNTSAVADHCFNAVGSHEIDFSKTKVLCKPTGYYQRFVHEAIQIYKHRHNFNREDGYKLSNHWKDVINQVKS

SEQ ID NO: 3076 - protein, 1025 aa, synthetic construct
  source 1..1025: note = Description of Artificial Sequence: Synthetic polypeptide
MTTCSRSSLLRAKAQRMSSHRRPNARQRYPGLKSNSTESISQGQSNVNVGPSLRIMQLNIEGLSSAKCDYIAKILQFQDVDVLALEETHLDRQCPRSKIIGYTLIAASHHPKHGLATYVKNDLKDTVQVVPHTSPHYIAIKINDVTVVNVYKPPGMEWPCPALPQPSHPIIHIGDFNSHHTLWGYSANDRAGEQLTSWAAAEDQHLLYDAKDRGTFKSARWKKCYTPDLCFVSRDQNGNPMPSTRTILDDFPNSQHRPVVIHIGLQIPLFRCAPKPRWNLRSAEWVNFTADLEESVGMIPPRAVNYRRFVGLIKAVAKANIARGFRKVFTPCWTPESEQLFRKFNADKKQETAKALLESLNLQRRERWRETVEALDFAKSSRKAWRLLRLMGAAATPAYKPPQVSPDEIARQLINNSRTSIDKSTRRQVYKELYCTLDNCQETSEFSRPFSVEEVDAGIAQLKCGKASGLDDIYPEFIKNLGPRARKWLATFFTDIHSTSIVPKEWKEARIIAILKPGKDASDAQNYRPISLLSVCYKLMERLLLKRLMPTLEEIVPQEQAGFRTGRNCCDQVLALTSHIEAGFERQLKTATAFIDLSSAYDTVWRKGLLLKLAKAVPCRPTIRLITEMLSNRWFTVHLGEAASSPRRLNNGLPQGSVLAPALFNLYTSDIPATSCRKFTYADDIALATQARKMEDTEAVLEKDLKTLEEYFKNWRLKPNPSKSVVSAFHLNNRQASKTLNVNFCGAKLRHDEHPRYLGVTLDRTLNYHHHLKQAKGKTKARVNIIQKLAGTTWGSDASTLKISTQALVHSTAEYCAPVWGASPHTNLVDAEINNALRIISGSLKSTPLPWLPVLANIAPANIRRDDATTREYNKIMKNFTLPLHQDLKEPPRPRLKSRKPFWIRASALAAENKDTATRWSESWAAMDVANKNIIHDPTVEVPGFSLPRRLWTTLNRARTQHGRCAYTFHKWKIKESPNCDCGEVQTIKHITDECSIHAHPGGIAEIHTASTTSLDWMRNLCIHL

SEQ ID NO: 3077 - protein, 736 aa, synthetic construct
  source 1..736: note = Description of Artificial Sequence: Synthetic polypeptide
SLSHTSAAVSSPNSKQILFKASLSLISERIRLLRFELDTLDRTLLQAHLTLTQKMSPSDWNHVDNMTASSADSLSVKCKANLISKFNHLSKKNPVPHITKLDVNKIVINQSSTPISDNLKTVLARGLNFAVTPKHIPVDDIISQVDVALKGIGHIQADVARAEIATILKNAKKPISNISKNERSELANLKKQKKNRSDIVILSADKGNATVIMDKDSYNNKIQNLLNDGSYSKIKNDPTNSLTIKTNKIITSSTSLIEPTKRPSLKPSAARPPRFYGLPKIHKEGTPLRPIVSTINSPTYKLARFLSDTLLPFTGKTSSAVLNSAQLVSMVKDVVLSPDDILVSFDVVSLFTKVPVPDTIEIIENLVQHGLDPDTPALVRHCLTNTYFTWNGTFYKQNEGTPMGSPLSPVIANVFMEKFESDAIQTSTLRPSLWKRYVDDTFVIWPHGLPALNLFLHHINSRHPAIKFTMEVEKDGKLPFLDVLFERRPDGSLGHSVYRKPTHTDSYLKPDSHHHPAQNNSLIKTLYHRAHCISDQHHLTSELKHVHLALKRNGYSDRTIRQAVSPSIQKQPLDTPVKTITLPYIAGVTKKISKILNKHKILVRFNTVHKIRDLIPSVKDVIPDLQYPGVYKLSCTCGDCYIGETKRHVSDRIREHKSDLKHGRTNSSAVADHCYNAVGDHDIVFSDTKVLCKPTGFYQRFVHEAIQIYKHRHNFNREDGFKLSNHWKDVLNQTKH

SEQ ID NO: 3078 - protein, 776 aa, synthetic construct
  source 1..776: note = Description of Artificial Sequence: Synthetic polypeptide
KSKFHRLYGEGFHITIRSFNKLRDKKAHLIESLTFLKRCHNSKVIPISFTLTSAAVTSSNAKRILFRASLALISERIRLLRTELDHVDKTLLKSHLTLTEKMSTSDWEHVDNMAASSAATMSAKCKDNLISEFNLLSKKKPDPHIKKDVDKVVINLSNSPISDGLKSVLAKGLNFAVTPKHIPVDDIIAQVDVALKGLGHIAADVTRSEIAATLKSAKIPVSNISKDERFELSQLKKRDDIVILSADKGNATVIMDKTVYNDKIQDLLNDGSYTKIKRDPTNSLVTKTNSIITDSASLIEQTKRFSLKPSAARPPRLYGLPKIHKEGTPLRPIVSTIGSPTYKLARYLSETLQPFTGKTTSSVLNSAHLVSSIKDISLSPGDLLVSFDVVSLFTKVPVPDTIAIIEDLVQQGLNADVPALVRHCLTNTYFTWNGTFYKQTEGTPMGSPLSPVVANIFMENFETDAIQASTLRPSLWKRYVDDTFVIWPHGRPALNQFLNHINSIHPAIKFTMEVEKDGMLPFLDVLIKKRPDGSMSHSVYRKVTHTDAYLKPDSHHHPSQKNSLIKTLHHRAQCISDHEHLTSELKHVHQALKANGYSDYTIRKAITPTVRKEPSEDPIKTITLPYIAGVTKNISKIMNKHKIQVRFNTVHKIRDLIPSVKDKIPDMQYPGVYKLSCICGSSYIGETKRHVSDRVREHKADLKHGRTNTSAVADHYFNAAGSHEIDFSKTMVLCKPTGYQQRFVHEAIHIYRHNFNREDGYKLSNHWKDVINHFGS

SEQ ID NO: 3079 - protein, 1266 aa, synthetic construct
  source 1..1266: note = Description of Artificial Sequence: Synthetic polypeptide
MPAQDTTRRAVRATASSSTGHFPSFTRALSPSQASVVLGEQISFGTFDERCAAALAHCTLLDEVIATLPKLYQVALSPVLTDIHHDATKRVEIAAQLERLRQHKAAGTLPSPLKGLGSTPAIQFMKGFLESQKPDFPGKAPDIVKACAAKLLDGFIETKAAEHAWYESRLQAMEVTRRVLTAADTHWKDELEQRYQVLEGFVRPPVEGQVPATVPSAEELHPLKFVTDPVMVAQHENIRRSIPRLASTVIMLVVNRALTQQQRNKAKRDLKDQADVEMATDDTAVDSAVKRLEKQVEGLVSGMKALTNGKGKVSFSSSSRTHVEDAHPFVSGQSPSSRPFSLVDHRARHEAQGVQLGKRLRQRQDDGHQGPSRRLRCSSGEAGSPQEGQGEGTREGQEDPEEIVAYVRAAPWRYDAPHSYPDVILMLPAPRAIQLLLERVPLEVKRAARFRSRVFLGPHVTVPEHLQMHVSSSLRYLMYSVPSSNVVREAWEDFKDRFRWRVFFTEKLIDSPNDDDPDFDPDYVVPKARKRFDDGVRTTPAYIELGLRKGDKFVDDYISNVMPSVKATSRSLNLVWLDELKDYLSANKYIVSPSDKNLGVCILQADWATDQTRTLWNDPSNYRKLGSLLEADEIMEEKHERIFRAARLARRLGKRQLAEFLVSKIHGKDAKTAGYTLGQFYGVPKVHKRPVKMRPIVPCHSVSQAPSATYVSKMLKPLVSRQPHVIHGSKHLVRQLESLQLDKHRKAWIVSGDIVAFYPNIPLENCIRVVTQMWRNSPEAEKLSPEERQLFLMSFMTANKRLVIQFGDEYAEQIRGLAMGIACSPDLANLYGSHYENPILARPDMKSKFAFFGRYLDDVLGIVYASSAEEAMSYANEIRYDGVEIEWSVSEYHTPFLDLFLYLDPVEKRLHWKPYSKPLNHRERIPWASHHPKDVKKGTFIGEMSRLATLCSKLEHYRDAISDLSNLYLARGYPDDAVRSWVKAHFSQRWERRLGEPIVRDEVFVLKSHFNPAWSAFNVHGLSEVVVESWLSSLSKLDGANQSQDRTWHAAESTDGSELKIFRQTTLGQFQGEQSSLYPGESRPEGVAGRVGVANVAKPRVTYDPRDVMDVDELVALSEPSFSAHDLSVVWTDNALRVPKSLRIRYAMAELRLDADPQVNPALHVPLGVEDQVGDLGPASDAESVASGDDGTTNSKPYRICTAKKDSGIVQEDLDIRSVGFHDRAWLVSRKKIRNLGDIVNSWKKDIIQAALNSDSVPHMHVDEWQ

SEQ ID NO: 3080 - protein, 22 aa, Deltaretrovirus sp.
RTLVLGAWLQPDPVPSYALLYK

SEQ ID NO: 3081 - protein, 22 aa, Deltaretrovirus sp.
RTLALGTFQGRSSQAPFQALLP

SEQ ID NO: 3082 - protein, 22 aa, Deltaretrovirus sp.
HSLAIGAFLGTSAHQTLQAALP

SEQ ID NO: 3083 - protein, 1096 aa, synthetic construct
  source 1..1096: note = Description of Artificial Sequence: Synthetic polypeptide
  VARIANT 278: note = Any amino acid
MWGGHRENLEGRALAELIDSYNLCTLNDGSPTMIPRPGARAQPVDITLCSPDLMSELSWEVIQEPLGSDHLGILVKSFNGRQATSGARIRHPKAGGWNLSKADWEKYRMVLDLKFSTSESTSCTYDYLTQEIRSAALGSIPRFPQWLYLNPNRAIKPWWDDDCNRVKQESIIAYESYKRAPTLENYVNLNRKLAISRRTYKEKKRIMWYEFCNSLDRQTPSNVIWKRIRSLKKGYSPQVEVTDDGHWVEEFHKSLTPDYASQFIDLSNIPIGDEDLNXPFQLWELKYALKKGGSTSPGQDGIHYQMLQNLPFPALLSLLRIMNEMWVGGAMIESWRTHLIFPLLKPGKDPNSYQSYRPIALSSCVCKTYERMIKHRLDWWVEEYNKLAPHQLGFRRHRGTLDCLAAFVNEVHLNRTENKPLLAAFVDIHKAYDNVNIAILKDKMLVMQVPGRVIVNIINMLQQRQLIIRRGVLVTGPRTTGIGLPQGAVLSPLLFNIYTSDLRDWLVPEIRIVQFADDFTVYTGGKSEENLVEIMGQALHDLNAWCNHLGFRISGNKSSVTMFSRKRQNILAGTIQLGPFKVSQSPIVKVLGLYVDHKLTWRPHIKRIIQSCEKALNVLRYVAHVTYGTDPKIALLLYRNLILSKIDYGCGIYGDACQTSLSGLDKVQYKAIRICLGAMRSTPTNVLLVEAKIMPLHIRRELLLGKFLSKRLIKFKEVSLMRVSELSEVVRSHRFWLKKKTPLMCEMFRVTEKLYSGLEVLHASPRRSLHYEVSCKESPYVHLDLYDKVKEEWGDLTYLAFIARMREIIINPYLLFTDGSKSEQGVGCAVLDPQTGSFRLYKLPNNASIFTAEIVAIWNAVILAEQIQSNDIIVILSDSKSALQKIKRPGDVFDPIIIEIISHLINAMGRLHLVWLKGHAGIVDNEKVDVLAKRAILLGEHTPVLNLADFEGALRKRCYDAWQKLYDLEKEIKGKYYADLQPRIPNKPWFVEVLEGERQFYTTIMRLRFNHNLTNPHLHKIKLLDSPKCDCDSGEDGDIDHLLFRCSRYNRNRDKFLKELATHVRFPCSAKSILAIMNPDALRIIYKFIRENKIKI

SEQ ID NO: 3084 - protein, 849 aa, synthetic construct
  source 1..849: note = Description of Artificial Sequence: Synthetic polypeptide
MVSSFRVDHQLYSDHMPIITTLLIHDKQQIYNDNTLPLLPKLNWSKQNLQKYQQSISFYLNHIVYKYDTLDAEVNYLNDIIRSSAIGNNNKKGPKVWKADWFDVECDRARRKSFKQLRLFRRTNEVEDKHLYLKYNFDFKRLCKNKKQKYYVDCARRLYNVKSSKEFWQQVRAFQKRKPWVLGNVSPEQLFEYFCSLHNSSVTARLVFDVSHRVDAFLDKPFSFDELELVLSKSKENKAPGTDRICYEFYKFAPIVFLNRLLLLFNKIFETSKIPASFKESIIFPLYKKGNKNSASSYRGISFINVICKLYSGLILHRLNNWLESNNILKESQAGFRSNYSTIDNLFNLTNIIKIKLSKKKQKVYAFFVDLSSAFDSIDRFSLIYKLHRTGLSTKIVTSIKNLLSGTTASVMCRNGLSPNFGTNIGVKQGCLLSPTLFSIFINDLEECLGGGVVISDNCKIKLLAYADDVVLLASNPISLQLMINEMESYCYRWKLKINLQKSKIMIFRNGGRPANNEVWYLGTQKVEVVNEFKYLGIILTPTLSYTKHFQNKLSKAKMSLNTIWHHFMDNTSIPFSTKIRIFNSVNRSMMCYGAQVWGWQRFVEVERLFYFFIKKLFKSPKTTPSAFIHTETGIDPIYLYTFEMHFKYLVRVLQLPDNRYPKILCHEIIKSKILWFLEIKNLITKFNLPNDLNWQNIGNFTLWEANFNILIKSLQADMNNTFQLKLFNSGSHPLYKNLQYNLGDNPYLSDSHPFHLIRMIFKVRGDLLPLNYKFYKNRDLDCLMCASGEVEDLFHFLAVCPALSNMREQWFGSRTLPAQHVAAYLNGKDWEALAKYCLAALSRRALLT

SEQ ID NO: 3085 - protein, 735 aa, synthetic construct
  source 1..735: note = Description of Artificial Sequence: Synthetic polypeptide
LNNKVNVEDKSFSQTIVNDISSMESLDDYKHIINQDFTNKEVLQHIKLLKSGKASGTDMISNEMLKHGAPFIINSLTKMFTQVLNSGIMPLHWNSSLIIPIFKSGNPKDANNYRGIAISSCVSKLYTMMLNTRLTKYLQETNQIVDNQFGFKKNHRTTDNIYILKSLINKYVNCKLKKSGNYLFSCFIDFSKAFDSVWREGLLYKLLRLGVGGNFYKAIKAIYKNTKYSIKLSAGITPYFNSCRGVKQGCNLSPQLFNIFVNGICDDVKNFDPVDLNGLKLNCLLYADDLLLFSTTQEGLQKCIDAVQNYCDNWHLKVNINKSKIIIFNRLGKNLENKFQFYLDATKLQCVNYYNYLGIVFQTNGKFHNAMSRLQDKAQKALFKMYKMLWISEECYSVSLAKKLFNSIIKPTALYGADVWGGVMLNIYKGSGKNKCTVDNCNFETKLFSDKLIPEKLHIKFCKRVLGVHRKASNDPCRGELGQYPLILDICVSVMKYYQRLVCKKKTILSLMQPMKNPKLLCMTHGLTLYKNYKKNNSIIDAAYEESKTLVHDPWLNFIQKLLVITDLTNSDPHQNNFCDIFKEKLKCLYRMKWKNNLLNNCKLDFYRCAKENFEFEHYLEKIKNKNHRIAYTKFRTSAHFLPIESGRHKGILKENRLCNLHECNEVGDEKHYILYCNNCQIKEQRSRFLAALYIYAPKLEDFSMDELFPIIVSSNDFFILSIFAKFIFYILDMF

SEQ ID NO: 3086 - protein, 1147 aa, synthetic construct
  source 1..1147: note = Description of Artificial Sequence: Synthetic polypeptide
CINDSLLETFVSKHDIVCLLETWLDYTDSVSVPNGYLYFRVDRKKHKNARKASGGMIIFYKSKFRKGINKFISKYKESLWLKLDKHFFGLENDLYINSTYIPPIGSSYYNSSDLTGEDIFNIIAEESLHYSNHGNVCILGDLNSRTVNLNDTLDDINISDIDIPYTELMDNNRQSMDTMNNKYGQYLCDLCLTTDMIIANGRIVGDLMGKITCFQYNGVSQVDYCVVQKSFLPKINYLKINELSHISDHCSLSLAINTNYVNEHSIDISLTPYKKYNWNNSSKENFVTQLNSKDSVDKMNTFLDNHFNLEESDKAISDFNDIMHFTADKALKFTAIKSRKFSRKNKRKNKQKWFDNDLAHVRKCLKDISRLVDKFPFDQNLRMQRMSINKRYKKLVKLKKNKFKEKLLHDLMNLETKNPSEFWDIIKQIKEYNDLDTSKHPPSIASTEWTNYFSKLYNISTTDSNSVLDSEVTNFVDNMDHNATSNPDLDKEISIAEIIKAIKKTKVNKSSGPDSILNEMFKCYSPLLLACISKLFNHILSSGCFPVHWSTSYLVPIHKSGHIWDVNNYRGIALSSATSKIFNTIIHIRIQHFLDKNNFFQDTQFGFRKNHRTTDNVYILKSLINKYTNKVGKHYLYACFVDLRKAFDSVWREGLLFKLANAGVTGKIIHLIKSMYSNTKYAIKTNQGYCKPFMSSSGVKQGCNLSPLLFNIYINDLSESLVQTEPVRLHDMSFNCLLFADDIVILSNSGSGLQDSLNLFNDYCKKWKLTVNIKKTKVIIFNKRGRKINDIFFLGDEQIEVVSSYTYLGITFQNSGNFTVAVNNLVKKAQRALGVLKQTLLLNNIIASPINAIKLFRSSVMPILLYGSEIWAAFNFKPNITPELFIQKLFSDSSKIESIHIKFCKQLLGVHKRASNIAVRAELGSYPLITEICTQMYKFWLRVKNKECSNIVHCAYQSECTINSNSWANFVSKLLEITRLNETDHNANIFRNNLKRIYYEKIWLPTLSKKEHNKLRIYNKYKSDYEFEPYLNKINNLNHRVSVTKFRISAHKLPIEKLRYQKIPSEQRFCTLCSDQSVGDEMHALFDCKLDEIVKARSYFWNTLSLYNDNILKLPKEDMFVHIMGIKDSFIANSLGKFINTILQCNT

SEQ ID NO: 3087 - protein, 676 aa, synthetic construct
  source 1..676: note = Description of Artificial Sequence: Synthetic polypeptide
RGEGSNSKKERCIQENAKSGTEENKVRYKRLKKQAKKVVAKAMREENEKVLSELKENPNKVYKIVKAMKGDGRDVTGGRCMRGSDGKLNFSERDRSKVWKEHMEKIMNEENEWDQDVEADLVEGPVERVSREEVVKAIRDMKTGKAAGPSEVSAEMIFASGDIGIGVIMELCQRVLDGRGMPEEWEVSVVVPIFKGKGDAKSCGAYRGVKLLEHAMKIVERVIVNRIRKLVEVDEMQFGFMPGKGTIDAVFILRRMQEEYRAKGKKLYMCFVDLEKAFDRVPRKVMEWAMRKRGIPEAMVRAVMSLYEGAKTRVRVGSELSEEFEVKVGVHQGSVLSPLIFAVVIDVVTESAREGLMREMLYADDLVLMDDTMEGLREKFVKWKKAFESKGLKVNLGKTKVMVSGTEEKALVSKVDPCGMCGKRVKVNSVRCVKCGKWIHGRCAKIKRVTQRLARDFACGRCKNGVGRVVEQEEKLCDEVESVKEFTYLGDKVSVGGGCEAAVTARARFAWVKFRECGELLYGKRFPLEMKGIVYKSCVRSALLYGSETWCLSENELGILRRTERAMVRVMCGVKLMDRKITEDLMQMLGLKEAVDRLAKANGVRWYGHVLRREDGHVLRRALDLEVSGPRKRGRPKKTWKMQVEEESGKVGMRMRDALNRAKWREGVRAIATSLR

SEQ ID NO: 3088 - protein, 742 aa, synthetic construct
  source 1..742: note = Description of Artificial Sequence: Synthetic polypeptide
INKNKKNFFKNEMINKLETCDKTDQNEYWSLLKQLRCQQNSLNPDSTINSDEWLDHFSKLYNNNNNNADFKQSLKLLEDTKLSNHELNNVISYNEIKKAIKNLKNKKSTAEDSISNEMLKTKNSLLIPCIQKLFNFILESGTYPTSWKSTILVPIHKSGDRSNPSNYRAIAISSCLSKLFTGIMNCRLTNHLEKNKLMNEVQFGFRKNRRTSDAIFLLKTAVEKTLYGKKETGAKCKRLYSCFVDLKKAFDSVSRDALFLKLQKTGINGNFYNIIKSMYTDQEYKVKLNSGITKGFHPTSGVKQGCNISPTLFNIFMNDLPGIFGENVDKPIMIDTFPLNCIQYADDLAIISESVDGLQNCLNKLNDYCTKWYLNVNVRKTKVMIFNNSNRLIKNMNFKINNEEITSVKEFCYLGTIFTPNGKFKINQSNLKNKAMKALFSIRHTILNHKMISTKLSLKLFDQLISPILLYGSEIWANEITNENNYLEQACNHFYRFILGVSKVTPLIGIRGEIGRIPIRIKATLSLIKYWHRLSLLPENHILKSALKETVSSNSSWIKHVKTILGHTDLSEVNKIYKVGNIAELTKLLEEKLKNKYIQTWYQQLSHVPKNGKSGNKLRTYNLFKMEYEFEGYLTEIQDFNLRRMVTKFRLSDHNLEIELGRRKFPRMEANYRLCKKCNTGTVEDEKHFILDCCFFTQERNTLLEDCKLEMCSTTNRNLIFTCIINSSTALAKYLKNTIYKT

SEQ ID NO: 3089 - protein, 1047 aa, synthetic construct
  source 1..1047: note = Description of Artificial Sequence: Synthetic polypeptide
  VARIANT 219: note = Any amino acid
  VARIANT 939: note = Any amino acid
IFIYVCLYPPENSVIHNRQDIDIFEKLSQDVIKYSNIGEVLLMGDFNARTGTLADHIINDNSTYMPIPDNYVDDEYNNRNNKDQKVNSFGKKLLELNKNNNLLILNGRTPGDLLGKFTCYNFAGGASTVDYALVSKSFLSNIQYFRVNEINNLSDHCAISLAITTRDLLSSDNNEIKCTPLPDRYLWDTKSIKRYQDALHSTEIINKLVSFNYENNNIXNSVTELTNIICNAADNSLKKIKHKISSSNKMKNTKRQKWFDDDCWNLRKKFREAAKLVEKYPKDCHIRGQFMVLRKKYNKILKIKRKQYKQNLWDSVTSQESNPKQYWKNFKIFSKNDTSISANNDIIQADEWYNHFKNLNNLKNSKTCKYDSDFQNKIINETREMETNKEINKELNEPITIGEVKAAVKKLKLNKSSGEDKIINELIKYGQNYLMEPITAVFNNVLKSGTFPKGWKGSIIVPIHKKGSRSDPDNFRGVALSSCLGKLFTATLNNRLIKYLEKNNLYSPYQFGFRRNRRTTDCLFILKSIVDKYIHSEYSKNSKSKKLYACFVDYKKAFDSMWRDGLYWKLQKYGITGNIYNLIKNMYSGVSYKVKTSKGLTNEFDSFMGVKQGCNISPTLFSLFINDLPEKIKSANGTPPELNSQKLNCILFADDVLILSQTQEGMQCSIDALAKYSNSWKLSVSLNKTKLMVFNKRNHTLNKKSVFYEGNEIATVDSFNYLGIVFTPNGKFKTASNTLKEKAMKAMFPLKQSLLTLSHYKISTALNLFDKLIVPIINYGCEVWGEESAKHSNIIESVQFAFCRFLLGVSKNSTKNAILGELGRYPLNVKIETQMLKYWLRLKSPVIPNIVATAFMEINTWKTGWVERIEEITKNNNLSELSKQHEKKIGEVLRENYVKTWRRELFNDSRMNGATNKLTSYRKFKTTFNMENYLNDIKXLKLRRLFCKFRISDHKLLIETGRQKKIPRNERICKLCTDDKIEDEYHFLIGCSKYDIPRNKLFKYIQGKKSDFLKMNEDEKFRLIMTSFAGIETAQFIHTSMNLRDET

SEQ ID NO: 3090 - protein, 702 aa, synthetic construct
  source 1..702: note = Description of Artificial Sequence: Synthetic polypeptide
  VARIANT 10: note = Any amino acid
TDSQDINTNXKHESNILNKLSTDSKELNEPISQLEIQKAINNLKNGKSPGKDNISNEMIKAGRHTLIIPVQKLFNMILTSGFFPTNWNTGIITPVFKKGDKSDPSNYRGITLLNTLSKLFTAVLKQRLIKYIDVNNLIVKEQIGFIPKFRTSDHIFVLKQILAKYLEKGKKVFACFIDFKKAFDSVWHQGLFHKLAQNGITGKFYTIIRSMYSESLSCVKTKNGLTSEFPVKRGIRQGDGLSPLLFNIYVNDIKNEIEQSNNDPPPPSLTVSQLSCMLYADDLLLLSVSESGLQNALNSLGTYCKKWKLEINTTKSKIMIFNKMGKHIKKHKFCIDKQELENVPTYSYLGIKLSASGKFYKAQEDLANRAMKACFKLKQQLFSETNIPIKIYLKMFDSVIKPVLLYCCEIWSNENINIKNLSNFNLPMEKLHSKFCKFLLKVNCKASNIACLLELGRYPLAFSSIVQTIKYWLRISDKPCNTLIYEAFRLGKDMDSKGIKNWVSHAKNIFNITNMDHMLDTVTADKKQTIITSLESNLKSMFKNHFKETLYNDNKGKNRKNKLRTYRMIKHNFDFEKYLEDVKNPSHRSALTKLRISAHTLQIEAGRYINQTVEERKCHYCQEKQIEDESHFLLKCSLYADLRNKFLHTTKVITTIDKSDIENTVDILKTKDKQSLIHLAKYIFECFNLRNDTHKQKIPAAL

SEQ ID NO: 3091 - protein, 1091 aa, synthetic construct
  source 1..1091: note = Description of Artificial Sequence: Synthetic polypeptide
  VARIANT 4: note = Any amino acid
LYNXYLISIIDKGHRDILGVRFENKLTGFTFLVFSCYLPPENSPWGRDANAFFSHLLSQLYMTDDVDTIIICGDLNARLGNLNDNIDVVDNIRNRHVIDTKINQHGHSFCEFLQESKLCILNGRFDRHQNDFTFISSRGRSVVDYVCVPQDHLSYCNNFNVITMSSLVEKYNLYDALTDRSKLPDHSLLIFDFLDRPLGSIVEQSLPNDINIGNNRHSATVRKYCLNQTPINFLESEVAREALLHIISKIEICRETQQEIDEIYDDLCKCILNEMNSTIPNYNCSSGARKRFRHHKPYWNDELYSMWRVMRERERSYTRFGGSKNIRTILRNDFKAARRAFDKKLRCCERNYRNDLVSSIEKVCTENPHQFWEHINKLGPVKRKDIPMEVYDDGGHITSNHNIVLNKWKHDFSSLYNQSDLDGFDANFYEHILHHKLVLENDLDDPLYDSNSELNKNFSTVEIKTVVAKAKSGKAVGVDKIPYEVLKNDSSVAILTHLFQLCFDSAKVPCIWKKALICPILKVRSSDPRVPMNYRGISIQSTLSKLYSALLNNRITRFLENNNILVDEQNGFRKDRNCEDHIYILTSIIRNRISHDLSTFAAFIDLRKAFDSVDRDALLYKLLINGINGKMYKSIRAMYSDTNSSVKLNDFKTDWFNTEQGVRQGDNLSPTLFSIFINDLAVEINLKQKGITLDNNVNVSILLYADDIVLLADNEIDMQMMLSHLNSWCEKWKIRVNNVKSKMLHFRKASEARSAFQFCIGDDVLDYTDKYRYLGIVLDEFVDYSVTAGIAADSASRALGALFVKFKTLKNLGFSTFTKLYDASVAPILDYCSGVWGFSKFEKCEMIQNRALRFFLGTHRFSPLPAVKGDTGWVSCRDRRWAHMVRLWKRLTELDDNRLVKRVFLWDHSLNYNNWSSEIYQIMELVDLNYEHLIDVNIHALRENIARRSESSWSEDVSHKPKLRVYATFKFEYKPEKYVLINLSRGQRSLLAQLRMGILPLRIETGRFRHEPVSERICKFCDANVVEDEMHFLFDCQQYNELRHEYLDSILNEITGISREQILVRLFSGPIRKLALFIEKAFYKRRNLLYV

SEQ ID NO: 3092 - protein, 1083 aa, synthetic construct
  source 1..1083: note = Description of Artificial Sequence: Synthetic polypeptide
MTPACFVDYKLSLPNRGTDYVCSHTRDSDSLLVTQTFGLPSYSNHLSPALYSCYLMKLLYNMILLPSDAHSDVINQHCRALPVLCRALIVLLLMISGNVHVHPGPSTVASPNSDLCSDICFTDFCSRKSLGFLHVNTRSLLPKMDQLKVWVHSSNPDVLVITETWLRKSVLNTDVNLSGYNLFRQDRSSKGGGVAIFTKDHLQCSVVSTKSVPKQFDLLVLSIKLSNSSLLTVAGCYRPPSAPACTLPALSSLLAPYTKSEFVLLGDLNWDMLKPPDQVLKQWDSLNLSQIITNPTRYDSKHPEKATLLDVILTNNPDRYQSGVFCNDLSDHCFTACVRNGCSVKRPVLICHRRLLKNFNEQAFLHELASVKWYRISLIPSVEDAWTFFFDIFSGIVNKHAPIKKMRIKNRFSPWFDRDLAELLHLKNCIWRKARHTHTQADWLSFRQMRNKCTQAIRKAKVSYFKEQFSLCGSNPKKFWKTVKDLENKPSSSQLPMSLNVDDVVVTDKKHMAELFNHHFIKSGFLFDSAMPPCPSNISSSPTPSNATIPDASPSFSPAPLQSFSLQAVTESEVLKELLKLDPKKTSGSDGLDPFFFKVAAPIIAKPISNLFNLSLLSGEVPIAWKAATVRPLFKGGDQADPNCYRPISILPCLSKVLEKLVNNQLTGFLDVYSILSGMQSGFRSGYGCVTATLKVLNDVTIALDSKQCCAAIFIDLAKAFDTVDHSILVGRLRSIGVSEGSLAWFANYLSQRVQCIKSENLLSQPLPVTKGVPQGSILGPTLFSIYINNIAQAVGSSLIHLYADDTVLYSAGPSLDFVLNALQQSFLSVQQAFSTLNLVLNTSKTKVMWFGKKNAPLPTGVITTSEGLELEVVTSYKYLGVWLDGALSFSQHISKLQAKVKSRLGFLYRNRSSFTPAAKLTLIQMTILPMLDYGDIIYRSAGKGALERLDVLYHSAIRFATNAPYRTHHCTLYSSVNWSSLYTRRKTHWLMLIYKTLLGLTPPYLRYLLQPSSSTYNTRSASHILLKVPKAHTSLGRSSFQFAAASDWNELQQTLKLDSFISISSFKDSIMDTLTDSCGCFV

SEQ ID NO: 3093 - protein, 1208 aa, synthetic construct
  source 1..1208: note = Description of Artificial Sequence: Synthetic polypeptide
  VARIANT 349: note = Any amino acid
QRNSKGVMVLINSNFDPNVQIVQTDHQGRWIILNMLLDNKQIWLINLYGPNNDDPSFFENIYKNLSTLQATLDSIIMVGDFNTVLNTSMDRKGNHTTNYHPQALKEIMNVMDILELVDIWRLKYPDLVRYTWRRLNQASRLDYFLMPFSLAPKVKVLIGDRMRSDHHIIGIYITLTEFPRGRGYWKFNQSLLDDKLFRTRTEEFITDFFRHNIGTADPLIVWDTFKCAFRGHAIQYSSIKQKQFRSKESILTKEIEGLTVQLDSNKNGTIEAQNKLEEKQKEMEELIQERSSVIYYKNKANWMEYGEKCTKFFFNLQYRNATKKMYKCYQKNVLKLVTNDGVTHDSPNXILKEEVKYFKNMFSFQAPPSPLTETNCMDFFPNNNVKLTSVQKDSCEGQITEEELLDAIGAFKDGKTPGLDGIPVEVYKTFFDILKGPLLACFNHSYINGRLSDTQQEGLISLLLKQDPSGIYKDPVHLKNWRPLTLQCCDAKILAKCLAHRIKKVLSDIIHPNQTGFLHGRYIGDNIRQVLETIEYYEISGTPGLVFIADFEKAFDKVRLEFIYKCLEYFNFGESLIKWVKVMYSNPRCKIVNNGYISESFKLSRGVKQGCPLSAYLFIIAIEMLAVKIRSNNNIKGLEIRGLKTKVSLYADDSCFLLKPQLESLHGLIEDLDTFAILSGLKPNYDKCTILRIGSQKNANFTLPCSLPIKWSDGDVDILGIQIPKERNDLTPIHFYRKLAKIDKILLPWKGKYLSICGKITLINSLVISQFTYLLMVLPTPSDLLFKLYEQKIFNFIWNGKPDKIKRAYLYNEYEFGGQKLNIKALDLSLKASVIPKLYLNPNWFSSKLVRMSHPMFKKGLFPFIQITPAHFRLFEKEIISKISLFFKQALESWLQFQFNPPEKTEQIIQQILWLNSNIVIDKKKIFEEMFKKGIILVNDIINRTGGVMSHMQLTQTYGNVCSTQNYNQLIAALPQKWKRQVEGEKSKELVCRPCIKEHKWLKKSVINKNIYQFHLRTKKLTAVPYKLQNSWEEIFDVPIPWHMVYELIRKTTPDSKLQIFQFKLLYKILATNRMLYIWGIQSSQLCRFCCEEAESLDHLFWYCPYVARFWSQVQEWLKNCNICLELTLQIAILGDLKSHSQSINNIIIILAKMFIFNLQSVEAMRIERFNCFVKHHSTVEKYMANRNPKWMMLRDRWEGLNGAEGWD

SEQ ID NO: 3094 - protein, 1279 aa, synthetic construct
  source 1..1279: note = Description of Artificial Sequence: Synthetic polypeptide
  VARIANT 407: note = Any amino acid
MVRGEISIASYNCNGLADYKKRRSVFTWLKEKEYNIYCLQETHSTSLDEVAWKKEWGGEIIFCHGQRNSKGVMILINKNFDLNVQIIRNDSQGRWILLNMKVDEKEIWLINLYGPNQDDPHFFENIYTNLLNLQATNDLIIMVGDYNTVLSTSMDRKGNHSTNYHHRALKEITNIMDTLEIVDIWRLKNPDLVRYTWRRLNQASRLDYFLVSFSLASKVKKVLIGDRMRSDHHLIGIHITLIDFPRGRGYWKFNQSLLEDNLFLTKTKFITEFFQYNIGSANPLIVWDTFKCTFRGHSIQYSSIIKKQFLAKETRLTREIHELIVQVDSNKNDTTEIQNKLEEKQKELEELIQERSNVIYYKNKANWMEYGEKCTKFFLNLQYRNANKKNLQKLVTEDGVIYDSPNXILKEEANYFRQMFSFPSHPLPLNEDYGKEFFPNNIKNGKLTNVQKDQCEGQITEEELFEAIKSFQSGKTPGLDGIPVEVYQVFFDILKAPLLDCFNYSYRNGSLSGTQQEGLISLLLKQDPDGKYKDPVYLKNWRPLTLQCCDAKILAKCIALRIKRVLPGIVHPDQTGFLHGRYIGDNIRQLLEIIEHHETYKKPGMVFIADFEKAFDKVRLDFIYKCLDFFNFGNSLIKWVKIMYSNPRCKIVNNGYFSESFELSRGVKQGCPLSPYLFVMAIEMLAIKIRSNNNIRGLEIQGLKTKVSMYADDSSFMLSPQARSLQCLIKDLDNFSVLSGLKPNYDKCTILRIGSLKNTTFTLPCSLPIKWADGEVDILGIHITKDINKLSTMNFNRKLVKIDKILQPWRGKYLSIYGKIALINSLVISQFTHLLMALPTPDDSFFKSYEQKIFRFIWDAKPDKIKHAYLYNEYELGGLRLLNIKALNLSLKASLIQKFYLNPKWFSSRLIRKAHPLFKNGLFAFVQIAMSHFRLIENYTFFKVSVFFKQALQSWLQFQFHPPEKIEQILWLNSNVLVDKIPVFMGKMFEKGILFLNDIVNWNGRVMSFMELSELYGKVCSIQEYNQLITALPQKWRRRVAAGGGRELVCLPNIKDQNWRRNKNSINRKVYQFHLRTRMLTTVPYRLQNSWEEIFDVPIPWYRVYELIYKTTQDSRLRAFQLKLLYRILATNKMLNIWGIKSSKLCRFCCEDTESIDHLFWYCPQVACFWSQVQEWLKMHSIDLKLTLEIVLLGDLERPGQSITNILILLVKVFIFNSQSVDSIRLDRLKLYVKHHSIVERYVLRRNPKWVASRDRWDGLREAEGWYVELETSGSGVAV

SEQ ID NO: 3095 - protein, 1281 aa, synthetic construct
  source 1..1281: note = Description of Artificial Sequence: Synthetic polypeptide
  VARIANT 743: note = Any amino acid
WFGALSYLFSDLHAMQATIGTTNERRAGLTFTSWNVKGLNEPIKRGKVLAHLKALSSDIIFLQETHLKNNSHNRLKCKWVGQVYHSNFSAKTRGTAILVRKGIPFLHKTTIVDKEGRYVIVIGEIHSTSVTLLNIYGPNIDNPSFFKRVLALIPDISHTNLVIGGDLNCVLDQYLDRSSTRRTPTSYSSEFLNTYIKNSNLFDIWRISNPTGREYSFYSHVHNVYTRIDYFLVDAKLLPYTCNVRYHDIIISDHSPLTFSLRLGDIVPNERVWRLNPQLLTEPTFCEHLKDQITFFFDTNDNTETSPALLWETLKAYLRGCIISFQTARSRQNRGELVELEGQIHLLDRENASHPSMEKHKKITSLKFEYNQILSAKIAKSFLYAKQKYFEFGDKPHKLLARQLRKNVSDRMIHKVKSASGELLSSPKDINDRFRQFYETLYTSKADPNPLIMQNFLEDCNLPALNQEDSNFLNKEISLEEIRETIKSLKSGKTPGPDGYPGEFYKTFSNMLSPYLHKMLVQANEDGALPSTLDEAFITVIHKKGKDPEEVGSYRPISLLNTDQKILAKTLANRLSTLIGKLVHSDQTGFIPNRNSFFNLRRLFNIMYSQRLPNVDLAVISLDAEKAFDQVEWPYLFKVLQKCNIGDGFIKWIQLLYRNPCARILTNQSLSPRFNLYRGTRQGCALSPMLFALIIEPLAQAIRSHAAIHGYNTKDTLNKISLYADDILLYVTEPQDSIPAILXVINLFGTFSGYRINWNKSELMPIRLQNTSWLEHLPVKLSSEKFTYLGIVVTKQYSLLFKENFPSLMQKLKANIQFWRTLPISLLGRINAIKMVFLPQLLYLYQNIPVFIPKSFHKQLDSIINPFIWDYKTHRIGKKHLCKSKMEGGLSLPNFIFYYWAANLRAVTFLLDDAPPPSSWLSMEREECHPFSIGAVILSPVNLEMSLYRNNPIIHSTVRIWKQIKVHFELRPISFMLPVARNPSFAPSNLDNTFERWGELGISTIGDLYIGGTFASFESLRETYNLPRSNFFRYLQIRDYVRKHLPTFGNAKPSMFDGCIKICPTSDKLISRIYDAFQSVSAPSTDAIKAKWEEELGTDISVADWEDSLEYIHTCSINSRHRLIQFKVLHRLHYSKTKLHRIFPGTSPMCDKCQAEQGTLLHCFALCSNLYGYWCGIFGVLSEVLETSIDPDPLLIILGVSDSLNGLTNPQKQLISYSLISAKKLILLFWKKREAPSTKLWLSELANTVHLERIRYILNNKLSTFDQIWQPFLSYLDQAAL

SEQ ID NO: 3096 - protein, 1185 aa, synthetic construct
  source 1..1185: note = Description of Artificial Sequence: Synthetic polypeptide
  VARIANT 5: note = Any amino acid
  VARIANT 6: note = Any amino acid
  VARIANT 7: note = Any amino acid
  VARIANT 141: note = Any amino acid
MSLRXXXYFAMIVSYVAALLIISVRPCWDDTINLLPENIYTKHIGSPIHRSGLYTAYHNVLNNGQVYLAPYSTEPLRRDKHKSNIYRKLLNYLFTTLLLSGDVQLNPGPNITEPAILTGVESRGWPRPLIVAAVEVGECYXPMVSLDSPGSRIDFDSSNIPKPLYAIPDFASGTQAVLISSPHPVQAGGIVNSATELPLIKTKQNGLNPAVRKHRKCNFFQCVNHSRVIWDPRAKPKGLLGGHLNIRSVIPKSDQIQHLLTDSNLDFLCLSETWLHKNSPCAALIVPGYNVFRRDRIEGRGGGLMIYIKEHIRCKQIEWSCDNELECIGLNVTLSPQMSFTLIGMYRPPSTKSVFFDQFNNMLRECDFGKEVILMGDFNINYEDKSCRKTLKRITNTFDLTQLVKGPTRVTCCSKTQIDLVFSNKPERVTKSFNMVTGLSDHNLTLIARKLSKSRFKLSTVRKPDQLRIPKSELNYFENAINGINWNDLLSYTDVEADSEVFLSTIQATINGFLKKIKSKPGQKSTLPWLNGEIWKLMKERDYALKTALKSKLEHDRRRFTMLRNKVMKEIRQAKANFFINIIGEAKGNSKLIWENLKKLTGKDHSNTAKRLEIMVNNNLTQDAVEIAIAFNSYFIDSVRVLTQNPSTGLLGSVLVNDAQPVFIIREVSESKVNKVISSLKNSKSKDVFGLDSTFLKNYKESLIGPITKVTNTSIGLGVFPRVWKSAIITAIFKSGDPADVSNYRPISILPVVSKVVEKCVAEQLISHLNNSPFTLHSMQFGFRAKHSTETANCFLLENVKSKMDKGGVVGAVFLDLRKAFDTVNHEILITKLSKFNFSPDALRWMKSYLEGRTQCVRVSNELSPTLSYDVGVPQGSILGPLLFSLYINDLPSVCTGSEVQMYADDTVIYVHAKSKQQAAQELTTVMVQVTKWLSDSCLHLNVKKTVCMFFTKRATDATEPDVYVSGEKLQVVSDFKYLGIILDSNLSFKKHVKKVIQITKFNLANFRFIRNCLTTEVAKLYFKSMILPHLTYCLTSWAQACYTTLKPIQSVYKQALKVLDRKPNSHHHCYILRKHELLSWENLVQYTDACLVFKILNGLAPPPLSIFVKQKTQTYGSRSTRSAMRGDCIVPLRKSTFSKSAFSVRASHVWNTLPSDTHNCTTYHTFTKCMKTWLKVNQTCEHNP

SEQ ID NO: 3097 - protein, 998 aa, synthetic construct
  source 1..998: note = Description of Artificial Sequence: Synthetic polypeptide
LLDIRAAVTHQHYDQEYDFPELDPLFVPPRAIELIPEAAPRRRRRRRGIRSGLLVRLRRRAHHPPLPSILLANVQSLDNKVDELRARISFQRDIRDCNILCFTESWLSPDILSPSIQPAGFSVHRADRNKELSGKKKGGGVCFMINYSWCDCDNVQKLKSFCSPDLEYLTIKCRPYYLPREFSSVIVTAVYIPPQADTTTALKELHWTLCKLETTYPEAAFIVAGDFNKANLRKTLPKFYQHIDCSTRAAKTLDHCYSPFRDAYKALPRPPFGKSDHDSILLLPSYRQKLKQEVPVLRSIQRWSDQSESMLQDCFDHADWDMFRVASENNIDVYTDTVTEFIRKCIGDVVPTVTIKTYPNQKPWIDGSIRAKLKARTTAFNHGKVTGNMVEYKQCSYSLRKAIKQAKRQYRDKVESQFNGSDTRRMWQGLQTITDYKGKTSHVADTDVLLPDKLNTFFARFEDNTVPPTRPAPKDCGLSFSVADVSKTFKRVNPRKAAGPDGIPSRVLRACADQLAGVFTDIFNLSLSQSAVPTCFKMSTIVPVPKKAKVTELNDYRPVALTSVIMKCFERLVKDHITSTLPDTLDPLQFAYRPNRSTDDAIAIALHTALSHLDKRNTYVRMLFIDYSSAFNTIVPSKLIIKLGALGLNPALCNWVLDFLTGRPQVVKVGNNTSTSLILNTGAPQGCVLSPLLYSLFTHDCVATHASNSIIKFADDTTVVGLITNNDETAYREEVRALAEWCQENNLSLQRQQNEGADRGLQETAEGARPYPHRRDRSGEGGKLQVPRRTHHGPWRSGARKITSPSNVNKTKELIVDFRKQQREHAPIHIDGTAVEKVESFKFLGVHITDDLKWSTHTDSVVKKAQQRLFNLRRLKKFGLAPKTLTNFYRCTIESILSGCITAWYGNCTARNRRALQRVVRSAQRITGGTLPALQDTYSTRCHRKAKKIIKDINHPSHGLFTPLSSRRRGQYRCIKAGTERLKNSFYLKAIRLLNSHH

SEQ ID NO: 3098 - protein, 1043 aa, synthetic construct
  source 1..1043: note = Description of Artificial Sequence: Synthetic polypeptide
  VARIANT 45: note = Any amino acid
  VARIANT 327: note = Any amino acid
CFCHRILRQKRASGYQDSDHSPRIRQRFFLQQQQAGLTGYSPNTXQGRHPRYSQEEATRRGRRAGCLVRTRRRRVGKLPLPSVLLANVQSLDNKLDEVRSRISYQRDIKNCNILCFTESWLNDDMDIQLAGYTLHRQDRTAHSGKTRGGGLCIFVNNSWCTKSKEVSRFCSPEVEYIVINCRPHYLPREFSAILFVAVYLPPQTDAGTKTALSQLYKDISKQENAHPEAALLVAGDFNAGKLKSVLPNFYQHVKCATRGKKILDHLYSTHRDAYKALPRPPFGKSDHNSILLIPAYKQKLKQEAPVTRSIRKWSDEADAKLQDCFAXTDWNMFRDSSDGIEEYTTSVTGFINKCIEDVVPTVTVRTYPNQKPWITGNIRTELKGRAAAFKERDSNPEAYKKSRYALRRTIKQAKRQYRAKIESYYTGSDARRMWQGLQTITDYKGKHSRELPSDTSLPDELNHFYARFEASNTEACMRAPAVPDDCVITLSVADVSKTFKQVNIHKAAGPDGLPGRVLRACADQLAGVFTDIFNMSLTESVIPTCFKQTTIVPVPKNTKATCLNDYRPVALTSVAMKCFERLVMAHINTIIPETLDPLQFAYRPNRSTDDAISIALHTALSHLDKRNTYVRMLFIDYSSAFNTIVPSKLITKLRTLGLNTSLCNWILDFLTGRPQVVRVGSNTSATLILNTGAPQGCVLSPLLYSLFTHDCMARHDSNTIIKFADDTTVVGLITDNDETAYREEVRDLAVWCQDNNLSLNVTKTKEMIVDYRKRRAEHAPILIDGAVVEQVESFKFLGVHITNKLSWSKHTKTVVKRARQSLFPLRRLKRFGMGPEILKRFYSCTIESILTGCITAWYGNCSASDRKALQRVVRTAQYITGAKLPAIQDLYTRRCQRKALKIVKDPSHPSHRLFSLLPHGKRYRSAKSRTKRLLNSFYPQAIRLLNRDQKAPQQLLPPSHKTPEQVIKWLPGLFALCAPPPSSTLCLSYMHSHFNYTFMYILPQLARPTSAPAHWLTGLSALCPTTRQPLFLRCCYSLFIIYA

SEQ ID NO: 3099 - protein, 1015 aa, synthetic construct
  source 1..1015: note = Description of Artificial Sequence: Synthetic polypeptide
  VARIANT 388: note = Any amino acid
  VARIANT 425: note = Any amino acid
MFFSLALFALFHIMSISGKLPRKGLKIAHINICSLRNKVHEINNLLTSDNIHILAISETHLDNSFDDTSVAIQGYNIYRRDRNAYGGGVAVYIQSHIPVMLREDLMSSVIEVLWLQVHLAHLKPFLLGCCYRPPSANSQYLNNMCEMLDSVCDVNREVYFLGDLNIDWFSSSCPLKRKLLTVTSACNLVQVINQPTRVFTNTTGTRSSTCIDHIFTNAVELCSKAVSVPIGCSDHNIVAISRKAKVPTAGPKIVYKRSYKRFCCDSYVDDVKNICWSDVINEEHPDAALDEFMKLLLPIIDKHAPVKKLTVRTVKAPWIDEELKNCMVERDGAKGVANKSGCTSDWLTYCKLRNYVTKLNKKKKKLYYEAKINDIKNDGKKTLEYFKXNYGQKDKFNSIFHRIRWLIHHKTIRMMEKKLWSTLNXIMGRKTNSTPSFIESDGLFITKPFDVANYFNDYFIGKVGKLRQEMPTTNSEQLYSCIKKQIMKEKQCKFEFCKVSVGEVEKLLLSINNDKPPGIDNLDGKLLRMVADSIATPICHIFNLSLEESLCPQAWREAKVIPLPKSGKAAFTGSNSRPISLLPALSKLLEKIVFDQIQCYFSVNKLTTDFQHAYREGHSTCTALTQMTDDWLKEIDNKKIVGAVLLDFSAAFDIIDHNLLLKKRMCYGFSTSAISWIQSYLSNRTQRVFFNGSFSNVKHVKCGVPQGSSLGPLLFSIFTNDLPLALNKACVSMYADDSTIYASATTANEVTETLNKELQSVLEWVASNKLVLNISKTKSIVFGTNHSLSSRPQLNLVMNGVAVEQVEETKLLGVTLDCKLSWSKHIDSMVVKMGRGLAVIKRCSAFLTPHSKKQVLQALVLSNLDYCPVVWSSAARKDLVKLQLAQNRAARFALNCNQRADINTMHASLSWLRVEERLTASLLLFIRNINVLKIPNCLHSQLTHSSDTHTYPTRHATRGLFTVPKSRTNSRKRTVLYRALIAWNFLPSHIAQINSKPGFKKQIKQHLAAQRLSPI

SEQ ID NO: 3100 - protein, 770 aa, synthetic construct
  source 1..770: note = Description of Artificial Sequence: Synthetic polypeptide
MISCRPHYLPREFSSVFFVAVYIPPQSEAGTKTALNELYSAISKQENAHPEAALLVAGDFNAGKLKSVLPNFYQHVKCATRGKKTLDHLYSTHRDAYKALPRPPFGKSDHNSILLIPAYKQKLKQEAPVTRSIKKWSDEADAKLQDCFASTDWNMFRDSSDGIEEYTTSVIGFINKCIDDVVPTVTVRTYPNQKPWITGNIRTELKARAAAFKERDSNPEAYKKSRYALRRTIKQAKRQYRTKIESYYTGSDARRMWQGLQTITDYKGKHSRELPSDTSLPDELNYFYARFEANNTETCMRAPAVPEDCVITLSAADVSKTFKQVNIHKAAGPDGLPGRVLRACADQLASVFTDIFNLSLSESVIPTCFKQTTIVPVPKNTKVTCLNDYRPVALTSVAMKCFERLVMAHINTIIPGTLDPLQFAYRPNRSTDDAISIALHTALSHLDKRNTYVRMLFIDYSSAFNTIVPSKLITKLRTLGLNTSLCNWILDFLTGRPQVVRVGNNTSATLTLNTGAPQGCVLSPLLYSLFTHDCMARHDSNTIIKFADDTTVVGLITDNDETAYREEVRDLAVWCQDNNLSLNVIKTKEMIVDYRKKRTEHAPILIDGAAVEQVESFKFLGVHITNKLTWSKHTKTVVKRARQNLFPLRRLKRFGMGPQILKRFYSCTIESILTGCITAWYGNCSASDRKALQRVVRTAQYITGAKLPAIQDLYTRRCQRKALKIVKDSSHPSHRLFSLLPHGKRYRSAKSRSKRLLNSFYPQAIRLLNI

SEQ ID NO: 3101 - protein, 1090 aa, synthetic construct
  source 1..1090: note = Description of Artificial Sequence: Synthetic polypeptide
MYLLLCLLFTQCHPGLNRLNDQWVSELSSPYALQFANTPTRPSCQYHQELGLSLQLHLYHSQTQLDLHLMAYFQNLKLLNYFFSVSKDSVRFIDNGAGSTKSSRIGQLRYIVMLLLLISGNVRPNPGPVDTMQSLPTPYDFKNRAGFGLLHVNVRSLFPKIDMIRIWAKTTNADVMVLSETWLKKSVSNNSISIDGYTVFRTDRMSKGGGVAIYVKSEFNTSEILSITKAKHFELLAVKVNVYKDSHITVVGCYRPPSASGDALNSLSDVLHKLNDSEFIILGDLNWDMLTSVSDSFKELCDSLNLAQLINAPTRPNPRAPNKSTLLDIILTNTPHKYTSTGIFCNDVSDHCAIACVRNTKMTKAKPRYIFKRHFRQFDEQAFLHDLYHNIDRVSLIPDVDTAWDYFYMKFVSICDKHAPVKKFRISGRDNPWFSDNLAELIRKRNISWAQARHTNAPVDWASFRALRNKCTGLIRKSKSDYYLNAVTENLNNPTKFWKLIKSVSGSNVSSGLPDHLMMDSNEVKDKAHIVGVFNKHFISAGSVFDNGGAQASNVSSVTVNYDIGPHVNHFNFEPVSYTEVYKALKAIDTKKSAGPDNLDPYLLKIAAGIITEPVAHIFNLSLLTNSIPSIWKSAYVLPLLKGGDPSDANNYRPISKLPILAKVYESLVNSQLKNFFIEKNILSGVQSGFRSGHSTTTAAMAVANDIINALDKKQHCAALFVDLSKAFDSVDHELLLARLRNIGLSEGAVNWFRNYLSDRTQCVYTDNHKSSFLEINRGVPQGSILAPVLFSIFINDLGNGMQPAKLHLYADDTVIYSCAPSLVQAVEELQTAFQSLQASLYGLKLVLNVQKTKFMTFTRARTLPENVSIVTSGGLSIEKVSSYKYLGIWLDDKLSFKVHVDNLVTKLKLKLGFYFRNKACFPLMARKKLVQATFLSVIDYGDLLYMHAASSVLQRLDSVYHASLRFITNAKSLTHHCTLYQMVGWTSLYMRRKIHLYVFIYKALLGKLPLYLCSLVSFTTSSYHTRSARWLLLKVPRTFTVLGKTAFSSCAPDAWNSLQSMLHLDMLVPLNEFKILMGDSVTEECKCFF

SEQ ID NO: 3102 - protein, 23 aa, Betaretrovirus sp.
PLLETVAQIKHISETAKLFLQCQ

SEQ ID NO: 3103 - protein, 22 aa, Betaretrovirus sp.
PEIETATLSPRTKIYTELKHLQ

SEQ ID NO: 3104 - protein, 591 aa, synthetic construct
  source 1..591: note = Description of Artificial Sequence: Synthetic polypeptide
  VARIANT 392: note = Any amino acid
MDVVEKEGKRKPYKSNLSNNEQGVLKALKTKPYVYLPSDKGGEFCVIEKSRYCEAAYKHLSDSNTYKKISRMSPNTIETKINKVWKDIAAKMNLKKRLTKSFVTKNSDLPNFYHLIKTHKDGPSIKIRPIVSNTNGPTTKTSWLLSKILKPLLNNVPYHLQSSDCLMARLNKTGKTTHSEFKYPFSLDVVALYTSIDPSEAIECLRRRLENNLLIKEMNTENIINLLTVILENTYFTFDQNIYKQIKGLPMGSSISGLLAIIFMDYLERQTLRTIQSIGFYARYVDDIFITTKSKKEAEEIFHIFNEAHPDIKFEIEYPDENGSLNLLDLRIKIDVDTPTYGFYKKSARKEIFMHQRSALPYLQKVNVIKNEKQRIANRCTEGKENYKQQLXFDKVLRRNGYHKEDIERMNSKPKTPMDRTQKKKKYFYLNIPFISDTLDFKIRKELNHTGLPIRISHKSWTLRQALANNTKKENICTMENCQTPKKICFRKNVVYCITCNACKEIYIGSTLRNLHQRIKEHLDPAGKSSVYRHLQQCQPRKERKSISIKILAGDNIQKNLRFKEAILILDKHPSINTKEEISEIASLICC

SEQ ID NO: 3105 - protein, 2038 aa, synthetic construct
  source 1..2038: note = Description of Artificial Sequence: Synthetic polypeptide
  VARIANT 277: note = Any amino acid
  VARIANT 292: note = Any amino acid
  VARIANT 311: note = Any amino acid
  VARIANT 428: note = Any amino acid
  VARIANT 457: note = Any amino acid
  VARIANT 521: note = Any amino acid
  VARIANT 525: note = Any amino acid
  VARIANT 800: note = Any amino acid
  VARIANT 1116: note = Any amino acid
  VARIANT 1135: note = Any amino acid
  VARIANT 1136: note = Any amino acid
MSKNGTDPHLLELCYKAHVFLNGSKEIPLSTAVGHWREIDSTGIFDSDFSELMEQIIAKPFKTEGLQLKIENAIKTFDKFIADAVNPDKLINHKHLNFFYNQLYYNPLKNFNFSIPIKSILKNNNIPSHRNFFNNEESTPLNKKSISFKNISHSKPFSYLTALTNNLKYENIDNILISIRNCTDSFFINLNICFFELKHLIKNNFINYFNDYFYIFYLKIQKFNNKKLQKSNYYQNNIPLLFKISSLTNDFFINIENYFSKIKTKRNINLFLNDFLXILKIKINILLFKYSXFKKLNPKNKHEKISTRSSXASGRLALAVTPSSPLDLTINTTKQTTTDINTDTTNTSHKFSNNRYSLFLDQNEPLDLSIVKHPHKNTNIPSTVKNTYNPLNKQKPFHKTTTKTIFSNAQNNIKKHNIDTSKRPHFSXPIPKSCNTDIKYEIPPIEKNTPKLNDIIXSNITFNPKTPNIQQNISLPKFILPSNLHNNTTNVDLDAESTLVNPHFQLNFNLKPCPNLFIPKXDLPXNLNMEIDQKLLLTNTKASDETISYSPITQTQTDESVLTHKLIELISINTQANRIIEQINSDIDLFSQSPHSYEIPNTETKEIFTVYNNLDIAKKRVEIIIEEDILKTKTQTNDDIPMINFNNNYINNNSLFKNILLSNESVENLFRDISDNDSIISKSPNKKINNQDFLKKTVKINKTMFNLRNDGYLICIGGKCEKKKIGIHNIDNIIEHRKTNHSDTIDKNTTFLCLLCEGSVKRKTILLNKIIQHTETFHSEKHFPVTREELNNKNKILELXMNTEGTLNCRYTNIKKHCQNDLTYKSTYAQIEKHIAKKHKRKTCNINEIICHCGETLEHHNIIEHHNKHIGVLPAEDKLRMIPDNIPVSVKDIGNDISILSTFFCMHLLPQSQQLLYNHTLLKPSYKQNFKTFFETFPFSQYPNWNEIILPFKTSTVNWAVFYFNKLKAFATIIDPLSPNSLQKHRKIADTILNTIKNIQNIIYPSNINLTELNYPMCANTNESGFFICHIIQCISINHNYITIPIISEIRKRLDNLINKVIIDRAPIDNILKYTNILNNIKILQNNNSENPDEGLAEINRIHECIFPIKHKIKKXLSLIHHLLLLKIIKLNKKXXFNPPSTIIKNNKIELTYKLRFNFNINYKSTINKIFNNSINTLSPHPDRIILNFEREIIIINDIKFKYKLPYYPENFIHKPTTIEEITNTFKIVDLSSSPGKDQISYLDWKKIDPDNSILCSLFNNILFKSITPLKWKTFKTKLIIKPGKENSSHDLSSWRPLAILDTSYRLFATLINRRLLEWIKLGNLININQKAIGCPDGCAEHNSVLLLLNERAVRMGTNINIVWLDLADAFGSISHDLIWNVLTNMGINNNTIKLFKNMYNNCNTYYECENNHYNFLKICIIIVTLIMNVKTTTTKTIPINNGVKQGCPMSMTLFCLAINFIITNILKDHPFIINNYNVSILAYADDIVLISDNRIKIAKILTDIIKYTSDVKLKFRPTKCGFYENNRNHDEKPLKIYNEIIPIIDENNIYKYLGVGFGGKSNHNIDNILEKALTDAEATFLSDLHPSQKLFAYKTSIHSRLIFPFRTCIVKHMILDCDRNRIVDNRTKQLGFDQKIKRLIKNSIGDIFQNISNNFIYAHCSMGGLGIVPSIDEYLIQSTIQLTRLLMSSDVTMRDFIIGELIECVRARFNYLENEIEMAMKWLNGDIDDEKVGKPCLFLKFKKSVYRLKIKFSIICKLTYIDNIFSLEISKNDFKIVINNENIDNASKIMHILTGEWYALEWYKMTHQGHIAETVGKSQFSKHLIKSTTLGDNQYFFLIKARNNSLNLNSNPSNHKDKKDVNCRLCRIQWETQAHILNHCTLSQNARRNKHNHVLEIVHNFFASKNYDIDIEKSPPNVDTTLRPDLIIKTTDKNKIKLSLVDIKVPYDNETNFINARKQNLDKYRNLAIETGKDNNCKAAVYTIIVGSLGSWDKENNKDLQKLGLGVNEIGEMARMCIKAAIEASYMIFMNHVTNNK

SEQ ID NO: 3106 - protein, 1070 aa, synthetic construct
  source 1..1070: note = Description of Artificial Sequence: Synthetic polypeptide
MLSQHSRSQALVKEEGCDRLGEPTLNLAILMEMKPKRNPLGRNPLSDAPYRNPGMVLNGQGPGRLPLGDAPCRDLGMVSSEQGSGRHFLSGALHRRPGVVKNEQGSSHLSRRVRRARKLVEPTRIRVGSWNVGSLTGKLRELVDVATRRRVNILCVQETKWKGQKAKEVDNTGFKLWYTGTAANRNGVGVLIDKSLKDGVVDVRRQGDRIILVRLVVGDMVLNVISAYAPQVGHDESAKRLFWEDLDSLVRTVPSSEKLFIGGDLNGHVGTTSAGFEAVHGGFGYGSRNQEGEEVLDFAVAFDLMIANTFFRKRRSHLVTFSSGQHYSQIDFILTRREDKRACLDCKVIPGECVVSQHKLVVADFRFQMRARRDKQAKIARTKWWKLKEETSEVFKERVIKEGPWKEGEDANNMWEKMANCIRKVASEVLGVTKGGRGVDKDTWWWNEEVQRTIKEKKECYRRLFHDRSVDNIEKYKEAKKIAKRAVSVAKGRAYEDLYQRLGTKEGEKDIYRMAKVRERKTRDFNQVKCIKDEMENILVKEDEIKHRWQEYFDKLFNGENENTTLQLDDSFDDTNRHFVRKIQESEVREALKRMKSGKAMGPDGIPIKVWRCLGDIAIVWLTKLFNHIFRSNKMPEEWRRSILVPIYKNKGDIQSCTNYRGIKLMSHTMKLWERVIEHRLRRITRVSMNQFGFMPGRSTMEAIFLIRQVMERYREKKKDLHMVFIDLEKAYDKIPRNVMWWALDKHKVPTKYVGLIKDMYNNVVTRVRTSDGDTDDFPIRIGLHQGSALSPYLFALVMDEVTRDIQGDIPWCMLFADDVVLVDESRAGVNRKLELWRETLESKGFRLSRTKTEYMRCDFGTTTHEEGDVSLESQVVPRKDTFRYLGSMLQRDGDIDEDVSHRIKAGWMKWRQASGILYDKRVPLKLKGKFYRTAIRPAMLYGAECWPTKRRHVQQISVAEMRMLRWICGHTRRDRVRNEDIRDRLGVAPIEEKLIQHRLRWFGHVQRRPPEAPVRSGTLRRDSNVKRGRGRPKLTWEEAIKGDLKGWNIPKDLALDRSAWKTAIHVPEP

SEQ ID NO: 3107 - protein, 678 aa, synthetic construct
  source 1..678: note = Description of Artificial Sequence: Synthetic polypeptide
  VARIANT 11: note = Any amino acid
  VARIANT 171: note = Any amino acid
KTLLKVETNPXTSTNNKWFVNISKTEIPPSVSNLLQLGGNFCLPPNKKTSITEFIKDIESNRCIQKERGEIRNSVIPLLHNFLHNNSSLDEVEKELLRMKRATSEFCKSNPNVIFTRADKGNITVAMDRLDYINNMEQLLHDKETYSIIKNNPIKKVEKDLNTTIKRWYDXDFISKQSYFSLHSSDSTIPKAYGLPKVHKENFPFRIIVSSVNTALYPIAKFLHKIINNSLPFDSRQVYNSFDIAKSLSGMKIREEYCLLSLDAKSLFTNIPLDLAMDGIRKRWPSIENNTKIPFDEFIFALKFILSSTFFTFNNVFYKQTFGTPMGSPLSPIIANIVLHDLEEKALKSINLEIPFYYRYVDDIVMAAPPNSLNFILETFNSFHNRLQFTIELEQDRSLSFLDLSLKITDNTIIIDWFHKKTFSGRYLSFFSHHPICHKIGTIYNMVDRALLLSHPTFQQKNLELIIGLLLKNGYPLEFIFKYIKIRIKNLFNTKMAPIITNDQDQTKKDENTKKFIVVPYIRNISEKTTSLLDKNTFTFGYRCINKINNFIKVHKDKTERDCSSNVVYKIFCNNCDATYVGQTKRQLRTRAKEHINNIKLDPSKHSVITNHRIFFDHSFNWKDIKILDTEENYQKRLISEMIHIKQQTNGLNSQNDTDLLHDSYFCLLDSLKDNTNI

SEQ ID NO: 3108 - protein, 955 aa, synthetic construct
  source 1..955: note = Description of Artificial Sequence: Synthetic polypeptide
  VARIANT 805: note = Any amino acid
  VARIANT 909: note = Any amino acid
MMSRACDASMPRSRPMARRAAYWWSAELAELRRATVAARRAHTRAKRRGMEDALNNAAAVLREARKALRTAIARAKAAAWDELLSELDRDPWGRPYKIVMKRLRPWAPPVSETLDPQFLGEVVDKLFPTRGRDIPEKTGPPPGWTEELEVSRHEMVAAFARITGRKAKAPGPDGIHAKVWARASSIIGEALRGPYTKCLREGTFPRRWKRARLVLLKKEGKPAESPSAYRPLCMLDDAGKIFERIIANRIIRHMSRNGPDLSPGQYGFREARSTVDAIRQVRSLSESITGDGKVALAISLDIANAFNSIPWGEVVAALSEHFRLPPYLVAIVRDYFRDRVLEFRDKTGLQQRRDMSCGVPQGSVLGPLLWNATYDKVLRGALPPGCHVVGYADDTFVVAGGASWVIAIAMGNWAVNCVVGSIKSLGLRVAPEKTEAIFFHDGSSRVPPRAFVRVDNTRVRVGATLKYLGLLLDGRWAFVEHFDKLAQRLGRRTDALLGLMPNLRGPRVGARRAYAYAAMAGALYGAPVWFREALASRRIRDVLHAVQRRLARRIVRAYRTAPSAATMVLAGLPPAEFTADALAWSYARAKAVRLQGGVVTPRVAALLRERARRRAMRAWRESLANDPPAAGSRILEAVLPHLDEWVGRPWGGLSYRTTQVLTGHGCFGEYLCRIRKEPTTQCHHCEADRDSAQHTLEDCPAWEELRGVLREEIGDDLSLRAIISQMVSRERAWVAVSSFCEQVMRQKEEAETVRERRPGGRMPPGEGNDGRGGGDGGHDPPWLPPRPPRRRRPAPRPPGPAARLXKGGGGPADQPRSPPPSPQLRRRGATAPIWRGGGDPPPLRLPAPPSGHAAAGGGPLTPASPARQTRPDGPGGATLRHNAESLPPLPRRGGGRGKGLLSPPQGRKXGRAAVSAARRGPGLRRGPDTPGLYPQQHQGKRRGRDGVPLPRPRAD

SEQ ID NO: 3109 - protein, 989 aa, synthetic construct
  source 1..989: note = Description of Artificial Sequence: Synthetic polypeptide
MVTPLRAIGGRPKSLRPSRRARQATESIPPARQSLASYPSRIRYANNSNNNWPHSPVTERAPNTAALRKMSKERLKKSRGRTRLPKRRKTKMIVCTFNARTLASEASIEDLMVQAQKIKYDIIGLTETRRHQSHHAIFDTGEELFLGTCDNRGVGGVGVLVNTNLAMSIDSFECLTTRIGRLRLNRCGSLPAVSIFVVYAPTSNYDEEEIERFYMELEKFYKEDHTFYKIIVGDFNAKIGPRRSPEELHIGTHGLEWNDQGERLSEFIMSTKTIHGNSQFQKAESKRWTWESPGGQFHNEIDHIIFNRRFCLTDVAVVPKFQTGSDHRLLRAKFYFTERGEKSAKFKSKKATPRMTTNWELFGTIAATWEDAVLDNIDEEYDRLVQHLHVCAKNAESEKATNRRLSSETLELIRQRGLARASGNHKLTSELTKLCRDAIKEDLKERRAAVLASAAEAGKSIRNARLSFANYKTKMTALRRPDGSITSSRKAMEKIIHDFYSDLFDSHVHLPTYQIPQDGYVVPNVLPSEIRHAISLVKTRTAPGPDKVRPEHLKNLPPVLINTLARLFTRYLSECKVPSQWKTSRTVLLYKKGDIHDIGNYRPICLLSVVYKLFTRVILNRIGRTLDEGQPCEQAGFRRGFSTIDHIHTVTKLIEVSREFKMPLCLTFIDLKKAFDSVETEAVIEALAKQGVQTQYIKILRELYCGFTTRISPFYKEVIIDVKRGVRQGDTISPKLFSAALENIMRRLEWEGMGVKIDGRQLHHLRFADDIVLITPNISQAAQMLADFDHECGKVGLQLNLNKTMFMKNELVPEAPFALNGTNISECSSYVYLGREINMRNDLVPELRRRKRAAWNAFKSVEEVVKRTKNLRLRAHLFDSTVLPALTYASETWALRKQDENAIRVSQRGIERAMLGISRLTQVREGIRSSDLRRRSKIRDAVSFAKASKIRWAGHVMRFRDDRWTRAVTDWIPRDVRRPRGRPPTRWSD

SEQ ID NO: 3110 - protein, 893 aa, synthetic construct
  source 1..893: note = Description of Artificial Sequence: Synthetic polypeptide
MKMPNRAASQSNSAEGPLSRPALTVLSWNAEGISDAKEEVLAHMCKQMNCDVLCLQETHRGSDNPRPKIKGMKLAIERPHRQYGSAIFMNEKIRPDSTSYTHNNDIEVLNVTIKGLTISSIYKPPNISFSYPSTTTNRHIVIGDYNSHSTQWGYDTTGDDGALVETWAQNNDLKLIHDPKLPKSFASARWKRRYNPDLVFCSRLLAPTSRKFVAEPIPRSQHRPIGIQLTAVITPNKTPFKRRFNFAKADWPAFTEHLDHALTHLPADPKNYESFIDIVKKVSRTHIPRGCRTTYIPGIDEESSQLLANYTTAYDTDAFSEDTINLGEELISRISQRHRQMWQHMIETTDLRHSSRKAWATIRKLGIDSTRAQQHYNVTADEVANQLLKNGKAPKTTNSHRHKLPGVDQNMSLFTRPISEEELQKGISTLHVNKAAGIDDIRSEQIKHMGSVAQKWLLDMFNNCIENTCVPKQWLRTKVVAILKPGKDSNEAKNFRPISLLCQTYKLLERLILNRIGPHVDSQLNCEQAGFRPGKSTTGQLLNLTQHIEDGFQNNLITGAVFVDLSAAYDTVNHRRLQTKLHDITNDLKLTRFIQKMMQNRRFFVELDGQKSRWRKQKNGLPQGGVLAPTLYNIYTADIPSTENTRNFIYADDTCITAQHSTFEAVELHLNTALASLSEYYRANYLRANPSKTQVCVFHLKNREAKRELKLKWNNVQLNHCEHPVYLGVKLDRTLSFKKHIEKTIGKVESRNAIIGKLASSHYGADPKTVQSAAVALCMSSAEYACPVWSRSAHVKKLDTTLNNTYRKITGCLKPTKVEEIYHLAGIGSPNQRRTNTCLKERMKQATDDRHMLHGYLQPHKRLISRHSFLDSVPPPEQNPPPSAKPVLIKGLT

SEQ ID NO: 3111 - protein, 1076 aa, synthetic construct
  source 1..1076: note = Description of Artificial Sequence: Synthetic polypeptide
MDTYKVYVLFYIALCIIIGLRGHSSYSKHETAFVPVRAPSRAHKQLHRSGYHKTPIKYYANASATFTLPIICCGDVESNPGPFELTSCNTNKRYKYTRGELVNINSNSCGKSLRLPVQTWKTISELEIGKEFKTRRGCRAGVRKLKHFKHPIPIILPTARTKLPKKYPRFPRRRCLTSVPVAPQSGCDLPSFLLSNVRSACNKFDELSAVISYLHVDIAAITETWFRNDCPLDNFSIPGYYLCTKSRTNRIGGGVAIYVRELLNPSPADVQVPINLEVTWVKIRPPRLPRSISCIYCAVVYYPQPDVELETELIDHLETTIDVILTNHTDAGFVILGDFNRMNIDPVLLTHSFRQVVDCPTRGAHILDKIITNIHQFYDKPQICSPIGMSDHNSIMWFPLKIKPKLPNTTRYVFNRPMTDSAIRAFGQWISSYDWPEVTEDVDVNVRCGSFYSTLNNAINIYFPVRKVLLHFRDKPWMTGEIKSLIHKRQIAFHQGKGILWKRLRNKVNSSIQKAKVKYYRSRIQKLKKSNPSRWYQEIRILTKGSRQSLNIPVDGVDPSERDKIANAINEHLISVSSDLQPLNLAALPAYLPSRSLPEVYPWQVNKVLSKIKCSTANGPDNISARLIRLFSVELSGPLTYIINASFSQGKVPASWKCAIVVPIPKVNPARIDKLRPISLTDHFAKVIEGFIAKWMYQDIAQHIDPCQFGNQKRLSTSHCLINILHYVFLNAEVPKTSSTILLTDFQKAFDRIDHTVAIKKLIEIGVRPAVVYWISDFLSERKQRVRYHSDLSEWCQINAGVPQGTKLGPLIFLVMINDFKSSESIHMFKYVDDLTLVECRKTNQISNMQEAVECLSLWADINKMQLNPTKCIKMDICFSRVPVNQSSIILENCVLSTVSQVKLLGVTIQNDLKWEAHVRDIEKRANAKLYMLRSLGKFGLSHEDLITIFIGYIRPILEYATQVWSGGLTSAQKQRIERLQKRALRIIFGKDYHSYANALTKSKLQTLESRRNDLCVTFFKKTLSCTDQFKQFIPQRAHNRTLRRTNKIPEPRCKTKRMQNSPIPDLIRLYNKSFL

SEQ ID NO: 3112 - protein, 938 aa, synthetic construct
  source 1..938: note = Description of Artificial Sequence: Synthetic polypeptide
  VARIANT 463: note = Any amino acid
  VARIANT 475: note = Any amino acid
  VARIANT 602: note = Any amino acid
  VARIANT 615: note = Any amino acid
  VARIANT 622: note = Any amino acid
  VARIANT 649: note = Any amino acid
  VARIANT 665: note = Any amino acid
  VARIANT 727: note = Any amino acid
  VARIANT 774: note = Any amino acid
  VARIANT 809: note = Any amino acid
  VARIANT 916: note = Any amino acid
MMRQTNKNGYRPGCRPGEQEPRPPVTNQAEVGKLNTGFKSKSRIKIIDCKAATLISSFNVRSLKSKEKMGELTALAEEKRIDILCIQEHHIYHENVDIQMKDMGKGWVLAMSSGTKNTVNSTVGGVGILMSPFAYKSLEYLEKVSSRILLAKFSGNPAPTVITCYSPTNCSPDNEAVNFYSLLSDVIKKIPQHNMKIICGDMNAQVSSADSKGFTFGNRTNRNGQYLLNMTFECDLIACNTRFQKAKEKLWTFTYPNKSQAQLDYILVNKKWRNSVKDCQAYNSFGPLNSDHRIVSTKMQLSLRSNKKVKAKSNLPHDWQLFKSDCSIKEAYTVEVNNRFEALYQDIENPTANEIYSALIEAHEGAATKYVPKRKGKKKRVPWENEKIREKRKCLKVAYNKKNGAPTAEHAETLDKAKKDLQDAYDEEQSNYIAQKCTEIEIGAVQQQTRKVWDIVKEITGKXSTPVDQLRGKTXQERLNQWKDHFSNLLGQPPPDNNNPVSKFTIAELKVAVTSLSNNKCPGVDGIPAEVWKSGALDQQLLEVCNRTLIHGEKPDLWSRSIIIPVPKKGDLSTPQNYRGIALTPIAAKVFNKMLLNRIRPXLEPLLRKNQNGFXPGRSTVXHILTLRRLVEGIKAKHLTAVLTFVDFXKAFDSINRKKMLKILXAYGIPHTIVTAVGVMYKDTTAQVRSPDGETDSFTILAGVLQGDTLAPYLFVIALDYALRTAXEGFEDLGFTLQERKSSRYPAVMITDTDFADDIALISDDLEKAQELLXQVESAASQVGLQINSTKTEFMLRNLREGEICTADXTKSKQVQNFQYLGSWVISKQDLNIRKAKAWTALNKLTAIWKSNLGRKLKVRFFTVETVLLYGSEAWTLTSSLEKQLDGCYTRLLRAALNVNWRDHMTNIELYRDITXISARLRDRRLRFSGHCWRSKSE

SEQ ID NO: 3113 - protein, 765 aa, synthetic construct
  source 1..765: note = Description of Artificial Sequence: Synthetic polypeptide
MVITNTWFKEHPRRVYTWKSPGDIVRNQIDYIAINSRFKRAVKQSKTYPGADCGSDHVPVICTLQCKLKKLKRPKVVKILDFKQLSKPDIRQEFTVQVKNRFELLIDEGEENTWETMRNILVETAEEYVPTKERKRRNKWMTEEILLMMKDRQKIGNRQCKKYRDLDKQIRQKCNEAKESWLNEQCVEIENQFDKNSNVYQRINEISGKKSGCSNPGCIKGKDGSILFEMKDKMSRWTQYIGELFEDSREAMPSFADEVKGEKILKSEVRWAMSKMKKNKAAGPDGVVTEMFEALEEYGVDRLTEIINKIYDDGTFPDELGRSIFITLPKKPGAVDCEQYRTISLICHITKIILRILLLRARSRITPMVGREQFGFVKDAGTRNAIFVVRNITERAVEMQKDVYMCFIDYSKAFDKVKHSELFEELKKLDIYRKDLRLLQSLYWNQFACIRVEGECSEYINIRRGVRQGCVMSPDLFNMYSEIILRELEDENGIQVGGHSITNIRYADDTVLFSESEKDLQRLLNVVVKESERMGLEINYTKTKCLVVSKKSSPKCNLKLKEQIIKQVSSFNYLGSMIAEDARCETEIKRRIALAKSAFSKLGKILTNRTMSMRTRIRVLNCYIYPVLMYGSETWTLASDTKKRLESCEMWFLRRMMKIPWTDKVSNEEVLTRAGVQRKMIREMLIRQLKFMGHITRKEGLENLALTGKIVGRRSRGRRRILWMDSLQKLLEERGVKELGVVLIQKARSRGLWNSMIAKVKRYGT

SEQ ID NO: 3114 - protein, 1050 aa, synthetic construct
  source 1..1050: note = Description of Artificial Sequence: Synthetic polypeptide
  VARIANT 36: note = Any amino acid
MRNSMKLHTGSVVFRVNKDRAVRSGLPSTVPSMLGXKQQQQKDDTSGITTMTFGQWNVRTLLDREGTGRPERRTALVAMELEKYRIDIAALSETRFSESGRLDDMGYTFFWSGKPDGVRREAGVGFAIRKEILAKLTEMPKAVNDRIMTMTVPLTKKGNATLISVYAPTMTSPDETKENFYNQLRRTLRDTPRTDKLILMGDFNARVGRDYEKWQSVIGRHGIGKCNTNGELLLALCSEFELLLTNTVFKQREEHKTTWMHPRSKHWHLIDYIITRQRDRMDVHSTRTMRGANCLTDHQLLRSKIAFALRSKRRKQGATKLAKLNTDRLHVNTQRLNLEQDMEKALTNWGVQEGMTVDQTWASLSKVVYETASNTLGKPERKHQDWFDPEDSELLILMKKRDETHQRVLQTRSTRSTTTAYKEACRHLQRYTRKMKTTWWEKKAEDLQRSADNNDMKSFYTGLKEVWGPQTRSTVHLKSLDGNTTFSDNKRVLERWSQHFETLLNQPGDIEPAARDRINQRPVVTALDDIPTRKELNLAIASLGDGKAPGVDGIPSEIWKHGGATLTNSLLMLIQQAWAEGSVPQEWKDANIVTIFKKGDRTQCGNYRGISLLSIAGKVFARILLNRLNAHITPDILPETQCGFRNNRSTVDMIFCLRQLQEKCIEHNRSLYVVFVDFTKAFDTVGRTGLWQLLRKYGCPEKFTGMIESLHTGMMAKVKEAGETSDSFPVSNGVKQGCVLAPTLFSIFLSAMLEEAFADFEEGVYIQSRQDADLFNVAHFKAKTKSTQILVRELLFADDSALVAHTPEQMQHVIDVFSSASKKFGLQINIKKTEVLFQPGTDHREEEEILVDGTALNQVDDFTYLGSTISKDGRIDSELVKRMSKASSAFGRLRTRLWNNHHVSTRVKCKIYRAIVLSTLLYGAESWTLYKSQVKKLHAFMMRHLRAIMRISWKDKVTNKEVLERANLPSMEDLLIRKNLRWTGHVIRMPSERLPKQVLFSQLPAGERGIGRPRLRYKDTIKRNLKRRQIETKTWTTAAGQRAVWRTAVK

SEQ ID NO: 3115 - protein, 986 aa, synthetic construct
  source 1..986: note = Description of Artificial Sequence: Synthetic polypeptide
MNSHAHTPDILVDDINESKYYTPQEFKNSFSYKPDNISLLHINSRSLNKNFEYVENLLHSLNNFAFSVIGISETWLHQNSPDMFNLPNYKLIRADRKGRRGGGVAFYITQNLNFKIRSDIKLTQAESLFIEINNSNVKNVIIGLIYRPPDSNCELFCDELDFYLHKIGDENKHNFILGDFNINFSPSSDNSNSTNCMQLMHSYGFFSIINKPTRINPHSSTQIDNIFSNVHNNKTIGGILCSEVSDHLPIFLTCECKLSCSKSFDELYRKESKRNIELLKQDLFFEGWAEVYNVNDVNTAYKHFSNKLQYYYEKNIPLGKMSNKRNKPRNPWITKGLLKSIQTRNRLYKLHLRNPTDTNLNTYKIYRNKLTKLIRTSRRLHFSNKIKKASSNTTATWKIIKEVMGKKTNPPPTDNITLNGTKIHDPSLHANSFNSFFTNIGPELASKINRTHAHFKDYLSNQNQESLFLNPTNPSEIINITQSLNNSKSHGFDRISMSLLKEIMYPLAKPLTHIFNHSLSQGVFPDLLKIAKVNPILKKDDPHEISNYRPISLLPSISKVLEKIVHNRLHKFITKHKILNSNQYGFRKNYSTDLALIQIYDKITSAIANKEHVIGIFCDLSKAFDTLNHAILLSKLSHYGIRGQPLLWFKDYLTNRRQYVTFNSYDSDPLLIQCGVPQGSILGPLLFLLYVNDIINTSPLLSFILFADDTNIFYSHKDLNSLNNTLNYEINKVSDWFKSNKLSLNTKKTHFMYFKHHSHNTETPIYIKIDGMLLEKKTNSKFLGVLIDETLTWNDHLHQVTMCISKSIGIISKLKFLLPHATLFLLYNSLVLPYITYCNSVWANCGSTKINSIFKLQKKAIRICTGSHFLAHTDPLFYKLKTLKIFDLNTTQVAVIMFKYINNLLPPSFDNMFRFNNSVHSYSTRISGNFHLTNPKLSITHKSVRHSGPDIWNDFPDNIKSCSTIYSLKATLKRQIIQSYAPHSLN

SEQ ID NO: 3116 - protein, 1075 aa, synthetic construct
  source 1..1075: note = Description of Artificial Sequence: Synthetic polypeptide
  VARIANT 76: note = Any amino acid
  VARIANT 105: note = Any amino acid
MGRKPKYPCGVCSRAVTTRTTGVQCEGTCLKWFHAECIGLTSTEYVAFDSSSIVWICNHCGAQNLAHSCLSSLQLXPDTNRFGVLDPDGQNVISEENSNSCRPTXDSSNPSSPGSPAYSSSPQNIKQRRSKHKPRPRVLRFLNVNCQSIRAKMQPFSILVHQHNPDIVIGTESWLSDGINSNEVFLDEQYSILRRDRSNDPHGGVFIATKTDLIVTREEELETDCEILWCRIEMAGSKTLRVAAYYRPKEDDEVSLAELQRSLSRLDRRHLVVLAGDFNLPGWKWDGPYVGPCAYPALHHQFGEIINDHGLTQLVKEPTRQANTLDLILISNPTLVNSVKVVPGISDHNCPVADIDMSPPRRYQPKRKVPMYKKADWEGFAELMQHVADYICSKSSSASVHDLWQLFKSGIEGGIQTFVPHKMLKQKQDLPWITSGIRKLIYKRDRLHKQVTRLRKQNMLVPFPLETELQHLKRLIQAESRKAYWSHLESIFTADGPNEYEGMKRFWKFVKNNRTDRCGIHTLKTDEHTITSPQDKAEALNKQFKMAFTNETDVPADLLPETSPYDSMPDIHISTEGIVKMLKKLKVRKAPGPDGIPALVLRKLSRVVAPSLRAIFDVSYRTSEVPDDWRLANVVPIYKKGDKTDPENYRPISLTSIICKMMEHIFASNIMGHARRNSILRPLQHGFQAKKSCELQLTGFVTDLLNNMEDNNQTDIVITDFSKAFDKVGHQRLLKKMEYYGVRGHNIDWISSFLSNRKQQVVLDGHTSSTVEVQSGVPQGSVLGPCLFLFYINDLPNQLSTKVRLFADDTVLYHTIQTPEDAELLQQDLDQLCGWSSKWMMALNPKKCQVITVSRKKTKYVHRYSLNGEILESVSAAKYLGITLTADLNWTQHVSATCKKANNTLAFLRRNLRVNSTRLKTTAYQALVRPLLEYGSAVWDPHTIRCVNQLEMVQRRAARYVLNRYHHTSSVSDMLSQLGWTSLQKRREHQRLTLLYKMHYSLVDFDIHHYIQPATVVRTTRSSRPYCYRVMQSRTEQHIHSFFPRTVRQWNALPLEVVLAPSVEAFQRQLKTGGK

SEQ ID NO: 3117 - protein, 994 aa, synthetic construct
  source 1..994: note = Description of Artificial Sequence: Synthetic polypeptide
  VARIANT 143: note = Any amino acid
  VARIANT 177: note = Any amino acid
  VARIANT 320: note = Ile or Leu
  VARIANT 443: note = Any amino acid
  VARIANT 444: note = Any amino acid
  VARIANT 945: note = Any amino acid
MMADTSTCVLQLNAEGPYPLKARSDYPHIAKENWVNVICLQETHCETEEQLHIEGFDLICFIPHKKHGIASYVKQGMKASTTGRSPVNSALQWSTFEAMGTHFCNLYKPPPVDVEIILFPKMPRNSFVCGDFNSRSTAWGYPXTNKNGKLIFEWLESQELVILYDSKDNPTFYSGSXKSWTCPDLSLVSSNIRHTCSRTVLPKFPRSGHCPIIISSDIKLQLSNLPKKRWNFRKADWPKFQELTNNKLTSRLPDPSTSNVNDSYSAFCSMLHQAAKLSIPRGRRHPYIPCWDEECDRLYESCAKSKTIEEREAVGNDLLXSLGEKRRIRWEEEVSEINFTHSSRKAWTTINKLTGRSSAPKQCPVTANSIASVLVNNGKWQDKTTEAKAHSRSVNSEIKNLLKSTPESTSMSEAFTLDEVETALKSIKSGKAPGNDNIHTEFXXNMSRKATSWLQAFLSTCMTTSTIPSKWKTAKVIAILKPKKPADEPKSYRPISLLSHIYKLLERLLLARIVDTVEEKLPTTQAGFRKGKSTTDQVVRLVNNIETAFQKKQKFGAVLVDLTAAFDTVWHRGLYLKTLQTIPDVRIVKFIMLLVQDRSFVLETSNGECSRKRKLRNGVPQGSVLAPILFNIYVSDMPKGECMQYSYADDTALGFDNHSFEAIKTSLEKDLKMLAEFFNRWHLKMSIPKTVSSVFHLANRCANRELNISLDGSRLNFVSTPKYLGVTLDRSLTFHEHAKATAQKTQARVSLLKKLAGTGWGANFTTLRTSTLALAFSTAEYAAPAWSHSTHVHKVDVVLNDAMRLISGTLTATPVSNLPILSGIPPAQLRRDAQYTKLAQKHDRDKCLVPAPSAFEGQRLPRRHFATQAAELPLEKPPSTLATWIAKRWSDLQWNSSTTNLKEFIPKPCAKPSGSDLPRKAWVNLNRIRTGVGRTQYFLHKIGAXSSPNCACGEIQTMDHVIDDCPIYKSPHGASGLRELDDETICWLNKDLPI

SEQ ID NO: 3118 - protein, 952 aa, synthetic construct
  source 1..952: note = Description of Artificial Sequence: Synthetic polypeptide
TDTDRGKQSKFKRKLRDRKLQIFYTNCDSLLNKRNELLLLLQSHDVDLVLLTEVFPKNHQNPLTHRDFILEGYDLHCNLEDGNRGVAIYIARDLYHLVGECDLQHSFHESVWILITLRGSDKLLIGCMYRSPSLDNHEELKRAFTQVTSINSSHVLIAGDFNYPNIDWKLGRARSHTEQEFIETVADCYLHQHIGEHTRYREGQRSSMLDLVFTNEDGMINHIDYVPGIGRSDHIGILFGLTVYTPDTHTPTPHLQFYRGQYDDMCKELDQIEWESELENKSVEDAWEFFLVTLTEKMEKFIPKSKPKHRRKKQRWMTREALRKQSQKHRAWKEAQRTKHPVDIMRARRLAKQLQTLTKQLCRNFEKDLAMNVKSNPKAFWRYTNSKLKTSCRLGELRTPDGERISTDKGKADALNTFFATTFTDEDKGHIPKLPPRHKGETLTSISISEDDVYKKLVHLSKYKCAGPDGIHPCVLKETAASVSEPLSIIYNASLKEGKLPSAWKVSHVVPVHKKASKMDVKNYRPISLTSVPCKILESLIRDEIVAHLMENDLLCDEQHGFVPGRSCVTQLLTVMEAWTEMLDKGTPIDVVYLDFKKAFDSVPHLRLLSKLETYGICGQIKEWIADFLQGRCQRVRVNDKLSDWTKVRSGVPQGSVLGPTMFVLCINDLPDGLQGSVKIYADDTKLYGKASTKDDLCSIQSDLDALMEWSNTWQMHFNTQKCKVLHIGPGNVKHIYALGDDVLEATSEEKDLGILIDDELKFHNHVAYAVKKANGVLSCIRRSFECRDRSTIPKLYKGLVRPLIDYGDSIWYPRFKTDSKTIERVQKRATKMIYDIRNRPYIERLRALNLPSLEYRRRRGDMIQVFKIIHGLERIPVDTFFEHSTSNTRGHSLKIVKQRCSTKIRQDAFSQRVINDWNTLPEEVVTATTVNAFKARLDRVWKDKRFCSPYE

SEQ ID NO: 3119 - protein, 541 aa, synthetic construct
  source 1..541: note = Description of Artificial Sequence: Synthetic polypeptide
MVDRVSLWHKLLRSGVDGKVFTVIKNMYSQAKSCVIVDGQMSEAFQCDVGVRQGENLSPLLFAIYLNDFEDFLSKHFKGLKFLVENVCADILDKEVNKDLFLQLYTLLYADDTLILADTAEELQVALNALSQYCKIWKLSVNAMKTKVLIFSRGKVRKFPVFRFGEDEIDVVDDFVYLGVQVNYNGSFKKAISKQVSQARKALFSMSLKVQRLKLPLDIQCELFDQLVLPILIYGCEVWGYEDLSQIEIFHRKFLRSALCVNKFTPDCMIYGETGRAWLANSIKHRMVSFWLRIVKGSPSKYSVKFYFLQRLISQNVDMSTSFKWLSCIEKILNHAGLGIVWLKQGEGFSNSWILSTLKLRLNDISKQDVMATIWTNSVCLNYRIFKEDCLFERYLVLLSKKDRITLSRFRCRSHRLPINNNRFKEAVNEISIECPCCDMHESGDEFHYVFVCPFFRKERELYLGRKVIVKRPCTSHMLNLFSCSGIGQLKKLVLFLRIIMSYFARLYTCKSEQSNHMSPIKRNVTTRSGRLIKQPTILDL

SEQ ID NO: 3120 - protein, 1047 aa, synthetic construct
  source 1..1047: note = Description of Artificial Sequence: Synthetic polypeptide
PSQRVNIELCCEITVSADKLAPNMLDNFGIIVVLSVIASLPHFIAESRPALLAGVTMEFQLVQNSIDTERYSDQYRYTKDELLSLRNTSHSRLPDNVFARIKELGIDKRRGCRAGSHKWRKIAVVEGRRRRTPKPPGVRAPQLIPIKTITTVSTDRQSQGNLPTIYMCNPRSLNNKLDEFSVVVHELCCDVCVVTETWFRADQPESDFAVDDYLVFAKSRDSRRGGGVAIYAKPESMPKTVNFLPPHPHHEVIWLQLRPKRLPRDISCLYVAAVYSPPDNDCVNDLIQYLVNAIDDIKTRHGDAGVVILGDFNRADTSELTSTCNLRQVVRKATRGTAILDLILTDIHQWYSEPEILSPLGLGGDHNAVLWKPKLNKTNSKNKAVRKFVRPMKDSAIREFGQWISQHTWDDVMASSSAQEKCDKLYASLQNAMDEYLPMKSVKMHPRDKPWVTPYLKSLIGQRQKAFSNDRTEEWKRLRNKVQNKKTELKKNFYKDRVLKLKRENPSSWYKHLKIMTSSKTASNIIIPESPELDDLAIADCVNDHFANVSQDIPELDLQSLPAYLPTPKPQLTVQPHEVYKELNRIKPGKSSGPDGIPARIVKEFAVELASPLCEVLNSSYHSGSVPSQWKGAIIAPIPKEKAASSIDKQRPISLTDHFAKIAEVFIYRKLLADVRHQLDPKQFGARAGRSTTHCLVEIYNFLCKRAELPSNVTSIVSTDFSRAFDRVDHTILIRKLITLEVHPWVIVWICSFLTDRQNQVRYHGELSSTRSMTAGVPQGTRLGPLLFLVLIDDALRESEVERWKYVDDMSLASAEPSNQHGQFMQNVLVNLEEWCNQNNVRLNPKKCNIMRVTFSKTPLPDRDFSLCNDVLQEVSAVKLLGVILQRDLKWNDHVSVTISRASSRLYMLRRWKEFHLPAADLVTVYVGFVRPLLEYACPVWHSSLTCAQSAALERIQKRALRLIFPGTSYNTSLDLARIVDLETRRKTLCINFATKASRSEVGSDWFTENNPTRNLRKNKRYREPRCRTNRYQNSPIPFMTKLLNFN

SEQ ID NO: 3121 - protein, 715 aa, synthetic construct
  source 1..715: note = Description of Artificial Sequence: Synthetic polypeptide
LTKTEKDLLSRGLNSAVTPEELPVVDLITATETAIRNNKLPETEAEQIRLKVSAALANAKAPASNITAQEKRALASLAKDKDITILPADKGRCTVVLNTTDYDSKILSLLGDSNTYEKLKRDPTSTYKKKVIDLLQKLEKEQAIDKPQYYRLYPGEATPCFYGLPKIHKEGTPLRPIVSSINSVTYNISKFLASILAPMVGNTPHHIKNSQDFAEKVSNLQLESGETMVSFDVTSLFTCIPTSEATEAIHKRLLLDKNLQERTTLSPAQICTMLDLCLNTTYFQFRESFYRQKHGCAMGSPVSPIVANLYMEEVEKRALLSFTGAAPSRWFRYVDDTWVKIQTKEVEKFTTHLNQTDTFVKFTREDVKGDSLAFLDCEIRIEEDRNLSIEIYRKPTHTDQYLLFDSHHPLEHKLGVIKTLQHRATKVPTTSHGRKKEQDHLTTALKTCGYPDWAFTKTRKKRDPSNEEEKDKRHSVSIPYMAGVSEKFRRILQKHNIPVQFKPSNTLRQKLVHPKDKTPRHKQSNVVYAVQCQQECRDLYIGETKQPLHKRMAQHRRATTSGQDSAVHLHLKESGHSFEDNQVRVLAREDRWFERGVKEAIHVKMEKPSLNRGGGLRHHLSPTYNAVLHSFHKQKPKHTHSFTRAGVTSPGDPAVKRKTSQTETRSTTLPTTLPTTPETSIQTTGILMQRLSVDISMPMVQKGYIFKLCTEPDQN

SEQ ID NO: 3122 - protein, 23 aa, Betaretrovirus sp.
PELETVPFIKSSTNATPLFSKLQ

SEQ ID NO: 3123 - protein, 1288 aa, synthetic construct
  source 1..1288: note = Description of Artificial Sequence: Synthetic polypeptide
MSVCYKCKSSVVNSIACLNCKKAYHPSCLRAFKNYSAIGQDLTSISACPCCDKLKSLQNPTSPTLNISTNTIFEDLGILKQETDLIKKTLDDLKTFITESPTTVCTFDKIDEYVRKSFDDLESKLISLLKDTLNREIEKLKNSIKNEVIAEISTNLNRTNDNIKTANSSDLTLKSTNSKNVSTQSVSKTNRYKVRIFADQKGRHCIDLLETYIPVSKYVIQSVVKPYSSLQELLKTENNNEQLGNNDFVVIYAGNHEAQKGKIPDENTLNELINHKFLNTNIILIGCPYFVNRPILNNFVYELNCNFYNVAKNNKNIYYLDSNDKIFDQFKTDNFVINKAVKRCIIKNLGDLITECQDHTNRSAVEQNPVATFLDTSLPSVDKSDSQSFLSVFLNRFVCLQPSHSKISISINKKTVNSFHGIYQNVRGLKSKSVTFFNSFLSTSDEFDLIVITESWLDDTVLDGELFSDNYYVFRRDRDLRHLGIHRGGGVLIAVNNKYNCRQLDISNISRRSSPAIDLVAIKINVTSYQHLFVFVVYIPPSISFSDFDNFFDLLNNFDEINNDNVLFLGDFNTPLFSGFSKNNFSISLKHFASFHNFNQFNNIRNNRNNILDLIFSNMDCAVSKSSFSFVPEDPFHPSLEFTLDIVAKTPDKFYMNRDHVAFNFKKANFDCLYTTLQVVDWSELEKFSDVNEACRVFYETLYNCFELSVPKLFCRKNYRTFPTWFNTDIINCLRRKSNILKKYRRTKNMHFYEEFKKLRSLSKSLITTAYSQYIGHMENTISKDPKKFWSFVQAKKRNSRIPGVLYHNGNAISNPNDIVNSFAKFFKSVFSDMTLTSDSPSMMTNLNSFITVNEINEHEIIRVLKRSKDTLTAGCDGIPSFLLRDCAHIFSKPLVYIFNLILQTSTFPNIWKIAHVCPVFKTGDITQIQNYRPISILCNFSKVFESIIYDRIYSSVKRFISPSQHGFVEKRSTVTNLACFTQFISDALDRKGQVDVIYMDFKKAFDQIDHHLLLLKLDQYGFSGSLLSLIKSYLANREQRVKYRNYISDSYVATSGVPQGSNLGPLLFLLFINDICGSLSTCAKLLFADDLKIYTEIKSIEDCLTLQNNINAVVKWCNENRLYLNPSKCNVMSYTKKREFLEFVYDISSVTLHRTFIIKDLGVIFDTELAFSEHIRDVTARAIKSYGFIYRNCRDFKNLSVMKTLFFSLVRSKLEYGALIWHPIYKIHIDQLENIQRRFLKFLVFIIDGNYPIRGYDQNLLLNRFGLQSLQFRRICIIIKFLYNLIN

SEQ ID NO: 3124 - protein, 603 aa, synthetic construct
  source 1..603: note = Description of Artificial Sequence: Synthetic polypeptide
  VARIANT 84: note = Any amino acid
MALRAARKNYYGQRIQNADNKSKCAWNIVNKICGRSKKCCEIQIEGDPKQIVNDINQYFINSAPFVRSKSNNNTISSNAKTMYXYPVTSQEIITIIQNLKNKKSAGFDEISNNIIKYCNEEISAPLSFVIQNSLDYGIFPEQLKRAQVLPIYKKGDPTLISNYRPISLLSSFSKIFETVISSRITNFLMKFQLLNSSQHGYIKGKSVDSAIFSFTNALLDKLEEKKVVLGIFLDFSKAFDCLDHNILISKLKKYGIRGIMLKLITSYLNNRYQQVTITKNSTVYTSNKLLIKQGVPQGSILGPLFFVIYINDLLNILTVSDNNSAVNFADDTNILIWGENMTDTMKEAKICMNKVINWTKENKLVLNFEKTYGIHFAICNHKNTEKPNKIVISSKEIELIEKTNFLGICIDHKLSWTNHIDNLLKKLNSVHFTIRVLKKYINIEQLRIIYFANFQSLLSYGIIFWGQSGKISKVFVAQKQVMRTMFNLKYNETCRNIFKSNNFLTVTGLYIYRLLLFFFKQNLLFNVTNDHKYDTRKVDLEYPRHKLTLTEKNSYYAGIKLYNSLPVHLRTPCNLNLFKKKIFDYILDLEPYTLNEFYNRQVF

SEQ ID NO: 3125 - protein, 31 aa, Spumavirus sp.
NKELPYWKSNGFLNNKKKPLRHVSKWKSIAE

SEQ ID NO: 3126 - protein, 1658 aa, synthetic construct
  source 1..1658: note = Description of Artificial Sequence: Synthetic polypeptide
  VARIANT 1383: note = Any amino acid
MPATSTWCQGPVPRIIGGSQEPAAFLSWGTLLCSGYGIIQHRDQQRLAGTPFFICRSLGTCQRAISSIIRTKMLLSGDVEENPGPSLRGMQWNCAGLSQGKRLALHKTLVDERIAFCLLSETRMTPGEAACFSVAGYQHHGIARNCKGGGVSILVREDLPVETGMAVVGRIEQVHATIHLARGTALTVTSAYIPPKHTFTATDLDTLLTTDGAQLIGADANAHALAWDRASPPNTKGETLTQWCIDNQFLVCNTGECTRYARHHGESTPDVTLSRNCTVYTWTSLYSPDSDHHHIFFDVIVGDDTDALSCPRLRKPMYAWLKADWRNFRLKVDELCRKIGREKNVNTLEQKLSSAIRIATKVSVPRGCRATPPHWTPELAKLDEEIAGCGPSHRREKLVATRKQILDRTTKKRWSTLCSRLAVSDRCSWHIVKKVYAPRPLTTPAVLVDNAAITDYRQAERFSKLYSSRARRHPDSHPPAPIKTIASEFSPITMAELRRSIKLLPSGSAAGPDCLYNEALQHLGRTALNVVLRLFNESLRTGVVPPAWKTGVIIPILKAGKKAEDLDSYRPVTLTSCLCKVMERIIAARLRDTVESQLTPQQSGFRPGCSTLEQLLHVRAALCRPTHQYRTGAVFVDYEKAFDTVDHDKIAREMHRMKVSPHIVKWCVSFLSNRTGRVRFKEKLSRSRTFERGVPQGTVLGPIMFIIVMNSLSQRLAEVPLLQHGFFADDLTLLARHTERDVINHTLQCGLNVVLQWSKEYFMSVNVAKTKCTLFGCIERHPLTLQLDGERIGADRTPKLLGVTFQCLQGMATHAAETRRKMDFRLLQIAAISASTWGPRRQVLRAFYLALVQAHTMYGIEVWYWDASERSRDLLAAAQHKASRIIAGIPHGTRKEDSLLEANLLPLKTTTLVRSMKFMLMCESRGGCLRRSAEEVYHSKHPVRALHSRIMRSYPHLRIEPREHPLETSTLRHSCRPLFHTQIKPVCADDPDDVKREASEKWIARHFARRGKEPPRREHYELWTDGSVSLGEKSGAAALLYRNNTLICAPKTGAGELSCSYRAECVALEIGLQRLLKWLPAYRSTPSRLSIFSDSLSMLTALQTGPLAVTDPILRRLWRLLLQVQRRKIRIRLQFVFGHCGVKRNEVCDEMAKKAADLPQLRDTWIPDIIAYAKRVLRSEEVHENTHRFGITGNHFPTKHKEELTREEETALARFRVGSSRHYGWMLRKINPSVPPQCRWCNPQHAAIGPTIQTAPTVATRTLQRTSEPTKCTECDATYQCRSSAVTHMVNKHGFVRADALRRIKYGDATPAVDIPPEPPPVVAIVPLPSSTRVPMRPQVLHCTLCASKFAVPGRLLHHLRTIHGIGSGSCRVKRGRENEDSXQGDGRAPAAPASQDTRKLPFQCDLCEASFGTRSSLSLHKKFKHKSIVTEDGTVVVVQFPRKRAREGNVDVPGKGEVQCGVCQKVLSCRDSLIRHCKAFHKGEGVELKCSKSTKLCATDSPHTNTSMLVCPTCGRQCASKTGLTLHQKKMHGMKVERAVTSQRGDCEETSLHLMSCPGLKELRVRFAVEGVCVQDVCFSKRLAQFLIAVERSRPQVKSSPKVTVIQPTLPSATSPLIAECGASRKSTGRRNSPDTLRDRGGMQSTSNRNRKKRGRE

SEQ ID NO: 3127 - protein, 975 aa, synthetic construct
  source 1..975: note = Description of Artificial Sequence: Synthetic polypeptide
MDVGTTKVQVYNRQTLLRYSNHAYLTIKDGLLHTLRDLGLLREPDLLTAVSPGANGGRRSTRKRCTRTRKRGKRAGVRARLRTNPSRPALPSILLSNVCSIENKMDYIRLQQTTQREFRDCCMFVFTETWLSERVPDAAIQLDGLVAVRADRVAALSGKNRGGGLCVYINTKWCRNSVLVSSHCSPLVEFVVVKCRPFYLPREIASIHIIGVYIPPSANTKDALWELYSAITDIQNTHPDGLIIIAGDFNHANLRSVLPKFHQHVEFATRGPNTLDQVYTNISSAYRAEPRPHFGYSDHISVMLIPAYRPLVRHSKPVLKQVKTWPAGAMTALQDCFECTDWNMFREAATYSDYINLDEYTSSVISYITKCIDDVTVSKCITTRLNQKPWFTGEVRVLLRARDSAFREGDEVALRTARAKLSRAIRVAKRAYTQRIHSFFQENGDTRRMWQGIQAITNYRSTPSACDSDASIADALNDFYARFEAQNNTGMRKTITLPSDQALRLTVADVRMTLERVNPRKAAGPDNIPGRVLRECADQLADVFTDIFNISLNTSTVPKCFKTTTIVPVPKKSSVSCLNDYRPVALTPIIMKCFEKLVKKHIKTLLPPALDPLQFAYRQNRSTDDAIATTLHLALSHLDKKDTYVRMLFIDFSSAFNTIIPQHLIEKLSLLGLNTSLCSWVLDFLTDRPQSVRIGNIISRTTTLSTGAPQGCVLSPLLFTLLTHDCAATHRTNHIIKFADDTTVVGLISNNDESPYREEVQRLTDWCRANNLSLNVDKTKEMVVDFRKTRSDHLPLYIDGSNVEIVKSTKFLGVHLAENLTWSHNTSYLAKKAQQRLYFLRKLRKSHLPPSILKTFYRGTIESILSSCITVWAGNCTVMERKTLQRIVKTAEKIIGVSLPSITDIYTTRCIRKATSIVADPTHPSHSLFTLLPSGKRYRSIRALTTRLCNSFFPQAIRLLNTQGPDRSLSHSHSI

SEQ ID NO: 3128 - protein, 1119 aa, synthetic construct
  source 1..1119: note = Description of Artificial Sequence: Synthetic polypeptide
MAKLIIFAVFACMVLPKVVTSFNRPIVCQYSIYISSSLLPSTYSSSYTLYNYLQHLCPPVTNKTRICRHFKSSSHIFSLFYLLLLAAGDISPNPGPCSIPTYIQPRFPANLRKSSRSSTFSNLIQIPTLPSSCLPFSCALLNTRSLTNKSTLIHDLFALIHLVFLHQKPGSHRMIPPLRLHSLMAVSLSLTPPEPLDVVGELEFSSRCRFKPIPIPPAFSFNSFEVHAIHIFHPLSVRVAVIYRPPSASSSAAFLSDFDTWLSFFLCTDSPAIILGDFNFHIDDASQPWPSRFLRLTSSFELQQWTNTPTHKDGHFLDLVFTKKLSLSGFNSEPFPLSDHNLVTFSISHSPCPPASSPTVLVRDTRDIDLPALAQSFRSSLISLKEMSDPDTLVSEYNHILSSTIGSFAPLQAKRTRALNPRPWLNSQTRFLRSCTRSAERMWKKSRTQADFIHYKFLLSCLNSALSKANKSTTVPLIHKPDSYAPVRDLLNVCGRNPVRKQTLFTINFYCPASILPCQKPTRVLQYPYKQSQIQPTTPVFSIQYFLHPSSTVSVNQTHSPQDFADFFKDKVESIRNQIPTSTNVNQLLLPKPPSACLNSFPPVTMSEVSKLLLSSPLTTCPLDPMPSSLLKHCVAELTPLLTHIFNSSLASGTFPSPFKQACVKPILKKATLDPACLSNYRPVSLLPLASKLLERIVFSRITNFLHTHDLLDPLQSGFRPGHSTETALCRVTNDLQVAKAKGHFSILLLLDLSSAFDTVDHSLLMQILYSLGIRNQAASWLSSYLSNRSFTVSYDNKTSSPVPLNVGVPQGSVLGPLLFSLYTLSLGDLIHSFGFNYHLYADDTQIYLSTPSLTAETEAQISNCLLAISNWMNQRHLKLNLTKTELIIFPPKPGPTPLFTISIDGMLINPVNSARCLGVIFDSSLSFSDHINTTVKTCHFFLRNIAKIRPFLSPDTSKTLMHALILSRLDYCNLLLTGLPNSHLSPLQSVLNTAARIILLSSKRVQAPPLLKSLSWLPIKQRITYKLLLITFKALHSSAPNYISSLVSLYVPARNLRSSQSNRLVVPPTTTAVSRIKPFSLATPYIWNAIPESLRRESSFNVFKTKLKDYLWEHLDNT

SEQ ID NO: 3129 - protein, 839 aa, synthetic construct
  source 1..839: note = Description of Artificial Sequence: Synthetic polypeptide
ILYIMTWMNENLHRHIATHFGENTLKLVREYERTARKLADYRNHLRFNLRCRYQGITPCSLRLGSSVKGHRAKVILQKAQKQLLNERVRQTNFSIEVLVHKFDNAKQRLTAKLPVLTLQRVVEFTERAQLAQHAKGKERQINKFTSLLSRTNNTQRTDKSTGRKEDENKTCQNIKDLWVKNLSDRELTEPEKDVLAKGLNFAVAPRYVPVVDFITATESSIHNNKIPVDEAENIRLKVSAALANAKAPPSNLSLQERRALTSLAKDSSVTILPADKGRCTVVLNTSDYHAKVSTLLNDSDTYEQLKRDPTSNYKKKVIDCLQHLEKEKVISPALYRRLYPGEATPCLYGLPKIHKEGAPLRPIVSSINCVTYNIAKYVANILAPLVGNTVHHIQNSMDFVKKVKELKLEIDDTMVSYDVTSLFTCIPTAEAIDTVRKRLKQDTTLSSRTKLTPEQVCSLLDLCLNTTYFKHKEVFYRQKHGCAMGSPVSPIVANLYMEEVEKKALDTFKGTTPSHWFRYVDDTWVKIKEREVPAFTKHINSVDKNITFTREDVKDSKLAFLDCAIVIKEGRDLDIEVYRKPTHTDQYLLFDSHHPLEHKLGVIRTLHHRAETVASNAEAKEKEYKHLKGALKTCGYPDWAFIKTKSKTNRKTRPTNRREEHSRRNNIVIPYVAGTSEKLRRIFNKHRIPVFFKPSNTLRQKLVHPKDPTPKHMKSNVVYAVQCSEECSDLYIGETKQPLCKRMAQHRRANSSGQDSAVYLHLKEKGHSFEDSNVHILDREDRWFERGVKEAIYASLEKPSLNRGGGLRHRLSPTYNGALTSLPRQFHNSSHFQSCTLKD

SEQ ID NO: 3130 - protein, 770 aa, synthetic construct
  source 1..770: note = Description of Artificial Sequence: Synthetic polypeptide
KGHRASNILQKAQKHLLNERVRQINFTIEALKQKIEQLKQSLTKQLPDVTLERVVQFIEHAQMAQHIKSKERQISKFTSLLSRSSGLKRTEELTWRQKDETSKNTKDTWVKNLSDRVLTQPEKDVLAKGLNYAVTPQHIPVVELITATESAINNNHIKVEEAEQLRLKVSAALSSARAPPSNLTTQERRALTSLSKDPNITILPADKGRCTVVLNTTDYHCKMTSLLSDSNTYEPLRRDPSSSYKKKVIDCLQQLEKEEAIDRALYHRLYPREATPCLYGLPKIHKDGAPLRPIVSSINSVTYSIAKYLANILAPLVGKTVHHIQNAKEFVTKIQGVKLEAEETMVSYDVTSLFTCIPTTEATETVRNRLQKDNTLSSRTKLSPNQVCLLLDLCLNTTYFKYKDQFYRQKHGCAMGSPVSPIVANLYMEEVERKALLTFNGTTPSHWFRYVDDTWVKIRSNEVAAFSEHINSVDNNIKFTREDVHENKLAFLDCLISIQEGGILKTEVYRKPTHTDQYLLFDSHHPLEHKLGVIRTLHHRAESVTTDTESKDKECKHLRGALKACGYPDWAFVKTRATKPNRNTKRNNRPEAERRRNIVIPYVAGVSEKLRRIFNKHHIPVFFKPSNTLRQKLVHPKDPTPKEKQSNVVYAVQCSEECTDLYIGETKQLLSKRMAQHRRANTTGQDSAVFLHLKDKGHSFENSNVQILDKEDRWFERGVKEAIHVKVEKPSLNRGGGLRHHLSATYNAVLTSVPRQFQNSSHIHSCNSNK

SEQ ID NO: 3131 - protein, 1067 aa, synthetic construct
  source 1..1067: note = Description of Artificial Sequence: Synthetic polypeptide
MSLLLLVLSFMFVLPKVTSSFSPPADCPYSITISSSLLHSTHCCSYNLYTFLKNLAPPTNTSQKHNNFKSFSHLLSLSLLLLLAAGDISPNPGPCRIPISYRPRNASLLVKPSQTANLSNLIQIPTLSSSYLPFSCALLNTRSVTNKAALIHDLFCSKSFHLFAITETWLSQNDNAIEAALSYGGLSFSHTPRITGRGGGVGVLLSPHCRFKLIPIPPTFRFPSFEVHAVQLFHPLSVRVAVVYRPPSSKSLATFLSDFESWLSFFLCSDTPAIILGDFNCHIDDPSQPWPSRFLHLTSSFDLRQWTNTATHKDGHFLDLVFSKNLDLSAFNSEPFPLSDHHLISFSISHVSPSPSTNAQPKTLIRNTQRVDITALSNSLSSSLSSFCASSDPELLVNTYNSILSSAINTHAPLQPQHSRAHNPRPWLNPQTRFLRSCARSAERIWRKSRVKADFLHYKFLMVCLNTALSQAKQVYYNTLVNNNKSNPRRLFSIFNALLHPSPNESIISEHTPQDFADFFKSKVDSIRKQFSQPSDTGNLNLPKSPLSVFSSFNLVTESEVSQLLRSSPPTTCSLDPMPSSLLKQCAPALTPALTHIFNSSLASGTFPSLFKQACVKPILKKATLDPSCLSNYRPVSLLPLASKLLERLVFSRVTNFLCTHNLLDPMQSGFRPAHSTETALCRVANDLQTAKAKGRYSVLILLDLSSAFDTVDHSVLMQILYSLGIRDQAASWFSSYLSNRSFSVALANKSSTPVPLSVGVPQGSVLGPLLFSLYTLSLGDLISSFGLKYHLYADDIQIYLDTPALTTDVQTQIGNCLLAISSWMNQRHLKLNLAKTELMVFPPKPGPSPPFTITIDGMTINPVNSARCLGVIFDQSLSFSNHINNTAKTCRFFLRNIAKIRPFLSQVTAKTLIHALILSRLDYCNLLLTGLPDSHLSPLQSILNSAARILLLSPKREPVQPHLSSLAWLPVKQRIAYKILLLTFKALHSSAPHYISSLVSLHVPGRLLRSSQSLRLFTPSTPTALSRLKPFYLAAPYLWNSIPESLRREHSPTLFKKKLSCYLLEH

SEQ ID NO: 3132 - protein, 1191 aa, synthetic construct
  source 1..1191: note = Description of Artificial Sequence: Synthetic polypeptide
MDPEKIIVWNVRGLNSLARQNSVRELLNCYGADIICLQETKMAQPSSRVLLSMLGSDFTGSLALPSNGSRGGILIAWRRHLGITGATRTDIHSISVQFCSVEGHQWWLTCVYGPQSNEAKIEFLQELRHIRAACQGPWMITGDFNLILHAEDKNNSHINRAMMGRFKKLVDDLALKEIPLHGRKFTWSNQQNQPTLVKLDRVLCSIDWEELFPGAVLQSAASEDSDHCPLLLGFKDCKGVKRRFHFESFWTKIEGFHEVVHNAWNSVPVGHCPFSTFDLKLKGTAKALQGWSSKKVGHIETQLHLARDLIHQLEIAQDGRILSVLERWLLSKLKKLALALASTKRTIARLRSRISWLKEGDANSKLFHSFARYRKKKNSVSKLTVGNQVLTAHSDIAAAVDQFYFDLIGASKDRNISINLEALETAGTPFPNLIELDSPITEQEVCNAINSLPSDKSPGPDGFTGRFYKICWSIIKEDLMAAVIAIWNRKFDNFHKLNSAFITLIPKKDNADQVKDFRPISLVHSFAKLITKILASRLASRLNDLVSPNQNAFIKGRFIQDNFMLVQQTAKLLHQQRHPCLMLKLDITKAFDSVSWPFLIEVMQNLGFGQIWRDIISGLLLTSSTRVLVNGHPGSIISHRRGLRQGDPLSPMLFVLVMDVLGQLVSKADEEGLLQPLSTRQLQHRVSLYADDVVLFINPVAEDMTMISDILQLFGEASGLYNNNQKSSVYPIRCHEDNLEIIQQFWPCEISSFPCKYLGLPLSLHKLRREQVQPIVDKIANQLPGWKADLLTKAGRSVLVQSVLTGVLIYSVMAVDLPSTTLKDIDKIRRGFLWRGRKNAMGGHCAVAWGSVCRPRELGGLGIFSITELSWALKMRWAWLQKTEPGRPWASLPLHTPKKIREFLQVALYSEIGNGASTLFWSDRWLDGQRIGDIAPRLIETIPMKLINKRTVQEAIEDNGWINDIPGSLSVGALADFLRIWDLVAHVDLDPHKEDKHIFRLAANGKYSTKAAYEGLFIGSVEFEPFERIWKTWAPPKCRFFLWLVAHKKCWTADRLEKRGLDHPEKCPLCEQERETIDHLLVNCVFSRECWFLLLRQFGLQGLAPQPTDINFMEWWHQANEAIQGSFRDGLNSLIMLGAWILWNHRNRCIFDGLSPNVANFLIHVGDERRLWETAGAKGLTSLVASLSHVA

SEQ ID NO: 3133 - protein, 838 aa, synthetic construct
  source 1..838: note = Description of Artificial Sequence: Synthetic polypeptide
MPLSESEKRKFWEDLDGMVRAVPTNEKLFIGGDLNGHVGSTNVGYELAHGGFGYGSRNQGEDILDFAVAYNLVIANTFFRKRDSHLVTFSSGHRSSQIDFVLTRREDKQACLDCKVIPGESVVPQHNLVVADFRFRIRTHRDKQAKIARTKWWKLKGETSEVFRERVFVEGAWSEEEDANNMWVKMATCIRKVASEVFGVTKGSIGEPKDTWWWTEDVQKAIKEKKECYRSLFHDRSAVNIERYKVAKKTAKRAVSEAKGRAYDDLYRRLSTKEGEKDVYKMARIRERKTRDLNQVKCIKDEMDQLLVKGQDIKQRWQRYFDNLFNGENETMDTQLDDSFDDLNRCFVRRIQESEVKEALKRMKGGKAMGPDGIPIEVWKCLGDIAIVWLTKLFNHIFRSNKMPDEWRRSTLVPIFKNKGDIQSCTNYRGIKLMSHTMKLWERVIEHRLRGMTHITMNQFGFMPGRSTMEAIFLIRQVMERYKEQKKDLHMVFIDLEKAYDKIPRNLMWWALDKHKVPTKYVTLIKDMYDKVVTSVRTTDGDTNVFPINIGLHQGSALSPYLFALVIDEVTRDIQGDIPWCMLFADDVVLVDESREGVNRKLELWRQTLESKGFRISRTKTEYMRCDFGTTISEDGDVSLGGQVVPKKDTFRYLGSMLQRDGDIDEDVSHRIKAGWMKWRQASGVLCDKRVPQKLKGKFYRTTIRPAMLYGAECWPTKRRHIQQLSVAEMRMLRWICGHTRLDRVRNDDIRDRLGVAPIEEKLIQHRLRWFGHVHRRPPEAPVHRGIIRRDNNVKRGRGRPNLTWEEAIKRDLKEWNIPMELCLDRSAWKEAIHVPEP

SEQ ID NO: 3134 - protein, 957 aa, synthetic construct
  source 1..957: note = Description of Artificial Sequence: Synthetic polypeptide
MTIVWQEGAGFILSPFGLSLRDFWRLFRWPGILFQLCSVLLQRLNSKLKATARGLQAWSAKKVGHISASLALARVLLHQLEIAQDSRGLSPAELWFLLCLKKHSLALSSLQRTIARLRSRIGWLREGDANTKLFHMHSRFRKKKNFVPKLVSNGAVLTSHDAKADLVNEFYGNLLGQCSDREQTISLESLGIPCHDLSALDAPFTEKEVWDTILHLPSDKAPGPDGFTGKFYRVCWEIIKADVMAVFSAVGSRRFANFQILNTAYITLIPKFEGADQVKNFRPISLVHSVAKLLTKLLANRLAGRLHDMVSPNQSAFIKGRFIQDNYMLVQQTTRYLHQQKQPRMLLKLDISKAFDSVSWPFLLEVLQHLGFGQVWRDIISGLLWTSSSQVLLNGLPGQPILHRRGLRQGDPLSPFLFILVMDTLGFLINKAAQDGLLQPLAPRALQHRVSLYADDVVIFLRPAAMDINVILDCLQLFGDASGLRTNVQKSSVYPIRCGDQDLALLQNMLPCELAEFPCRYLGLPLAIKKLSKIQVQPIIDKIANQLSGWKAELLTKAGRKVHVQHVLTGMVIYLAMAVDLPAWALKAIDKIRRGFLWRGRRDVKGGHCHVAWGIVCRPRELGGLGISSMKELAWSLRMRWLWLAKTEPSRPWASLAIQVPKKVKDFFSMAMQTELGNGATTFFWTDRWLSGHRIAELVPRLFGIIPKRRVSKRTVVDAISNQSWISDIQGALSVGIINEFLILWDLIDSIVLRPQVEDKHFFRLAANGKFSSKEAYRGFFLGSSEFEPFHRIWKSWAPPKTKFFMWLVAHRKVWTADRLQKRGMDHPERCPLCDQDQETLDHMLIGCVFAREFWFKLLLQVNLQFLAPQSEDSAFLEWWRTLCTKVSGIARDGLNSLVILGVWTLWKQRNGCVFDNKSPSIADAIRRVELEVHLWEMAGAKKLSLLTAPIPGIPAS

SEQ ID NO: 3135 - protein, 801 aa, synthetic construct
  source 1..801: note = Description of Artificial Sequence: Synthetic polypeptide
  VARIANT 526: note = Any amino acid
  VARIANT 619: note = Any amino acid
  VARIANT 795: note = Any amino acid
MAKKKRRKAPWAEAPSSPRAPAPVAHGPGGVRSGLVGLPSTVGFAAQGKCAPAPFASSVSWTGWSQGISPLAPTLAHSSRVLLPAATSDAAVSKSRLGFPPDFVGSHSFPHCAAFLSRLWSLPVSSRSDFHGGWCVTSLRPPVPEEEWPRLGSGVVRSSKNLGEMDPKNKNIPNPSWDRWGQKDSAQGSQSWNRNRNLSWRLKPQIGKSDPQEGLMSSSSGDGIQSGNPILSPSSLKKEIDLARPAFCQKCGVEGHHARNCFNALWCDICRKDTHVTARCVLPKQSKPNMPIVGMAADGLGFYLSHFAKPISKKPKRVFIGLVKVIEGLVSAEDLAKDFGFHFPWGKTWKATKCHSGFLMQFPSQERLDEMISFPELKMKMSGAKIVVVPWSSRAKPKSRLHTAWIVAENVPEELQNYQSICEIGSMIGAVEEVDLMSLDSEDIVRFKVHIKSVAMIPPVVEVAVKPFLYDIYFRIESISDEGWNDETINLGKRASVDIHGINDPVFDKSGKKPRNDDEVGDEDPXPNFKVGESSSQGKESFKKSEVFMDSSKDKSGDGMRLEDLSDEKVDFDPNEDDLLSSQELEEFAKDMEEMHTDFQAKVGEVLSIPLTKDEKQDXVGKKSSEILMSTSEGIRKSSRLEKNEDIKVADKAISRAEAKDAFLNKGMNNNPFSLLNASNEDLFDISNKLGVCLGSSDSSAMANLDLIRDLEMSRKILAIQSCGSKKNEEPIVDDINEVDSSVHADSEKDIDYDLLDVMVLRKGRKIKHRKKQQKKASPKIRYTPNKKREAENFXLPPDPF

SEQ ID NO: 3136 - protein, 673 aa, synthetic construct
  source 1..673: note = Description of Artificial Sequence: Synthetic polypeptide
TAPLEEEYRLFLEAPIQNVTLLEQWKREIPKVWAEINPPGLASTQAPIHVQLLSTALPVRVRQYPITLEAKRSLRETIRKFRAAGILRPVHSPWNTPLLPVRKSGTSEYRMVQDLREVNKRVETIHPTVPNPYTLLSLLPPDRIWYSVLDLKDAFFCIPLAPESQLIFAFEWADAEEGESGQLTWTRLPQGFKNSPTLFDEALNRDLQGFRLDHPSVSLLQYVDDLLIAADTQAACLSATRDLLMTLAELGYRVSGKKAQLCQEEVTYLGFKIHKGSRSLSNSRTQAILQIPVPKTKRQVREFLGTIGYCRLWIPGFAELAQPLYAATRGGNDPLVWGEKEEEAFQSLKLALTQPPALALPSLDKPFQLFVEETSGAAKGVLTQALGPWKRPVAYLSKRLDPVAAGWPRCLRAIAAAALLTREASKLTFGQDIEITSSHNLESLLRSPPDKWLTNARITQYQVLLLDPPRVRFKQTAALNPATLLPETDDTLPIHHCLDTLDSLTSTRPDLTDQPLAQAEATLFTDGSSYIRDGKRYAGAAVVTLDSVIWAEPLPIGTSAQKAELIALTKALEWSKDKSVNIYTDSRYAFATLHVHGMIYRERGLLTAGGKAIKNAPEILALLTAVWLPKRVAVMHCKGHQKDDAPTSTGNRRADEVAREVAIRPLSTQATIS

SEQ ID NO: 3137 - protein, 673 aa, synthetic construct
  source 1..673: note = Description of Artificial Sequence: Synthetic polypeptide
TAPLEEEYRLFLEAPIQNVTLLEQWKREIPKVWAEINPPGLASTQAPIHVQLLSTALPVRVRQYPITLEAKRSLRETIRKFRAAGILRPVHSPWNTPLLPVRKSGTSEYRMVQDLREVNKRVETIHPTVPNPYTLLSLLPPDRIWYSVLDLKDAFFCIPLAPESQLIFAFEWADAEEGESGQLTWTRLPQGFKNSPTLFNEALNRDLQGFRLDHPSVSLLQYVDDLLIAADTQAACLSATRDLLMTLAELGYRVSGKKAQLCQEEVTYLGFKIHKGSRSLSNSRTQAILQIPVPKTKRQVREFLGTIGYCRLWIPGFAELAQPLYAATRPGNDPLVWGEKEEEAFQSLKLALTQPPALALPSLDKPFQLFVEETSGAAKGVLTQALGPWKRPVAYLSKRLDPVAAGWPRCLRAIAAAALLTREASKLTFGQDIEITSSHNLESLLRSPPDKWLTNARITQYQVLLLDPPRVRFKQTAALNPATLLPETDDTLPIHHCLDTLDSLTSTRPDLTDQPLAQAEATLFTDGSSYIRDGKRYAGAAVVTLDSVIWAEPLPIGTSAQKAELIALTKALEWSKDKSVNIYTDSRYAFATLHVHGMIYRERGWLTAGGKAIKNAPEILALLTAVWLPKRVAVMHCKGHQKDDAPTSTGNRRADEVAREVAIRPLSTQATIS

SEQ ID NO: 3138 - protein, 673 aa, synthetic construct
  source 1..673: note = Description of Artificial Sequence: Synthetic polypeptide
TAPLEEEYRLFLEAPIQNVTLLEQWKREIPKVWAEINPPGLASTQAPIHVQLLSTALPVRVRQYPITLEAKRSLRETIRKFRAAGILRPVHSPWNTPLLPVRKSGTSEYRMVQDLREVNKRVETIHPTVPNPYTLLSLLPPDRIWYSVLDLKDAFFCIPLAPESQLIFAFEWADAEEGESGQLTWTRLPQGFKNSPTLFNEALNRDLQGFRLDHPSVSLLQYVDDLLIAADTQAACLSATRDLLMTLAELGYRVSGKKAQLCQEEVTYLGFKIHKGSRSLSNSRTQAILQIPVPKTKRQVREFLGKIGYCRLFIPGFAELAQPLYAATRPGNDPLVWGEKEEEAFQSLKLALTQPPALALPSLDKPFQLFVEETSGAAKGVLTQALGPWKRPVAYLSKRLDPVAAGWPRCLRAIAAAALLTREASKLTFGQDIEITSSHNLESLLRSPPDKWLTNARITQYQVLLLDPPRVRFKQTAALNPATLLPETDDTLPIHHCLDTLDSLTSTRPDLTDQPLAQAEATLFTDGSSYIRDGKRYAGAAVVTLDSVIWAEPLPIGTSAQKAELIALTKALEWSKDKSVNIYTDSRYAFATLHVHGMIYRERGWLTAGGKAIKNAPEILALLTAVWLPKRVAVMHCKGHQKDDAPTSTGNRRADEVAREVAIRPLSTQATIS

SEQ ID NO: 3139 - protein, 677 aa, synthetic construct
  source 1..677: note = Description of Artificial Sequence: Synthetic polypeptide
TVSLQDEHRLFDIPVTTSLPDVWLQDFPQAWAETGGLGRAKCQAPIIIDLKPTAVPVSIKQYPMSLEAHMGIRQHIIKFLELGVLRPCRSPWNTPLLPVKKPGTQDYRPVQDLREINKRTVDIHPTVPNPYNLLSTLKPDYSWYTVLDLKDAFFCLPLAPQSQELFAFEWKDPERGISGQLTWTRLPQGFKNSPTLFDEALHRDLTDFRTQHPEVTLLQYVDDLLLAAPTKKACTQGTRHLLQELGEKGYRASAKKAQICQTKVTYLGYILSEGKRWLTPGRIETVARIPPPRNPREVREFLGTAGFCRLWIPGFAELAAPLYALTKESTPFTWQTEHQLAFEALKKALLSAPALGLPDTSKPFTLFLDERQGIAKGVLTQKLGPWKRPVAYLSKKLDPVAAGWPPCLRIMAATAMLVKDSAKLTLGQPLTVITPHTLEAIVRQPPDRWITNARLTHYQALLLDTDRVQFGPPVTLNPATLLPVPENQPSPHDCRQVLAETHGTREDLKDQELPDADHTWYTDGSSYLDSGTRRAGAAVVDGHNTIWAQSLPPGTSAQKAELIALTKALELSKGKKANIYTDSRYAFATAHTHGSIYERRGLLTSEGKEIKNKAEIIALLKALFLPQEVAIIHCPGHQKGQDPVAVGNRQADRVARQAAMAEVLTLATEPDNTSHIT

SEQ ID NO: 3140 - protein, 677 aa, synthetic construct
  source 1..677: note = Description of Artificial Sequence: Synthetic polypeptide
TVSLQDEHRLFDIPVTTSLPDVWLQDFPQAWAETGGLGRAKCQAPIIIDLKPTAVPVSIKQYPMSLEAHMGIRQHIIKFLELGVLRPCRSPWNTPLLPVKKPGTQDYRPVQDLREINKRTVDIHPTVPNPYNLLSTLKPDYSWYTVLDLKDAFFCLPLAPQSQELFAFEWKDPERGISGQLTWTRLPQGFKNSPTLFNEALHRDLTDFRTQHPEVTLLQYVDDLLLAAPTKKACTQGTRHLLQELGEKGYRASAKKAQICQTKVTYLGYILSEGKRWLTPGRIETVARIPPPRNPREVREFLGTAGFCRLWIPGFAELAAPLYALTKPSTPFTWQTEHQLAFEALKKALLSAPALGLPDTSKPFTLFLDERQGIAKGVLTQKLGPWKRPVAYLSKKLDPVAAGWPPCLRIMAATAMLVKDSAKLTLGQPLTVITPHTLEAIVRQPPDRWITNARLTHYQALLLDTDRVQFGPPVTLNPATLLPVPENQPSPHDCRQVLAETHGTREDLKDQELPDADHTWYTDGSSYLDSGTRRAGAAVVDGHNTIWAQSLPPGTSAQKAELIALTKALELSKGKKANIYTDSRYAFATAHTHGSIYERRGWLTSEGKEIKNKAEIIALLKALFLPQEVAIIHCPGHQKGQDPVAVGNRQADRVARQAAMAEVLTLATEPDNTSHIT

SEQ ID NO: 3141 - protein, 677 aa, synthetic construct
  source 1..677: note = Description of Artificial Sequence: Synthetic polypeptide
TVSLQDEHRLFDIPVTTSLPDVWLQDFPQAWAETGGLGRAKCQAPIIIDLKPTAVPVSIKQYPMSLEAHMGIRQHIIKFLELGVLRPCRSPWNTPLLPVKKPGTQDYRPVQDLREINKRTVDIHPTVPNPYNLLSTLKPDYSWYTVLDLKDAFFCLPLAPQSQELFAFEWKDPERGISGQLTWTRLPQGFKNSPTLFNEALHRDLTDFRTQHPEVTLLQYVDDLLLAAPTKKACTQGTRHLLQELGEKGYRASAKKAQICQTKVTYLGYILSEGKRWLTPGRIETVARIPPPRNPREVREFLGKAGFCRLFIPGFAELAAPLYALTKPSTPFTWQTEHQLAFEALKKALLSAPALGLPDTSKPFTLFLDERQGIAKGVLTQKLGPWKRPVAYLSKKLDPVAAGWPPCLRIMAATAMLVKDSAKLTLGQPLTVITPHTLEAIVRQPPDRWITNARLTHYQALLLDTDRVQFGPPVTLNPATLLPVPENQPSPHDCRQVLAETHGTREDLKDQELPDADHTWYTDGSSYLDSGTRRAGAAVVDGHNTIWAQSLPPGTSAQKAELIALTKALELSKGKKANIYTDSRYAFATAHTHGSIYERRGWLTSEGKEIKNKAEIIALLKALFLPQEVAIIHCPGHQKGQDPVAVGNRQADRVARQAAMAEVLTLATEPDNTSHIT

SEQ ID NO: 3142 - protein, 576 aa, synthetic construct
  source 1..576: note = Description of Artificial Sequence: Synthetic polypeptide
GVLDAPPSHIGLEHLPPPPEVPQFPLNLERLQALQDLVHRSLEAGYISPWDGPGNNPVFPVRKPNGAWRFVHDLRVTNALTKPIPALSPGPPDLTAIPTHLPHIICLDLKDAFFQIPVEDRFRSYFAFTLPTPGGLQPHRRFAWRVLPQGFINSPALFERALQEPLRQVSAAFSQSLLVSYMDDILYVSPTEEQRLQCYQTMAAHLRDLGFQVASEKTRQTPSPVPFLGQMVHERMVTYQSLPTLQISSPISLHQLQTVLGDLQWVSRGTPTTRRPLQLLYSSLKGIDDPRAIIHLSPEQQQGIAELRQALSHNARSRYNEQEPLLAYVHLTRAGSTLVLFQKGAQFPLAYFQTPLTDNQASPWGLLLLLGCQYLQAQALSSYAKTILKYYHNLPKTSLDNWIQSSEDPRVQELLQLWPQISSQGIQPPGPWKTLVTRAEVFLTPQFSPEPIPAALCLFSDGAARRGAYCLWKDHLLDFQAVPAPESAQKGELAGLLAGLAAAPPEPLNIWVDSKYLYSLLRTLVLGAWLQPDPVPSYALLYKSLLRHPAIFVGHVRSHSSASHPIASLNNYVDQL

SEQ ID NO: 3143 - protein, 576 aa, synthetic construct
  source 1..576: note = Description of Artificial Sequence: Synthetic polypeptide
GVLDAPPSHIGLEHLPPPPEVPQFPLNLERLQALQDLVHRSLEAGYISPWDGPGNNPVFPVRKPNGAWRFVHDLRVTNALTKPIPALSPGPPDLTAIPTHLPHIICLDLKDAFFQIPVEDRFRSYFAFTLPTPGGLQPHRRFAWRVLPQGFINSPALFQRALQEPLRQVSAAFSQSLLVSYMDDILYVSPTEEQRLQCYQTMAAHLRDLGFQVASEKTRQTPSPVPFLGQMVHERMVTYQSLPTLQISSPISLHQLQTVLGDLQWVSRGTPTTRRPLQLLYSSLKPIDDPRAIIHLSPEQQQGIAELRQALSHNARSRYNEQEPLLAYVHLTRAGSTLVLFQKGAQFPLAYFQTPLTDNQASPWGLLLLLGCQYLQAQALSSYAKTILKYYHNLPKTSLDNWIQSSEDPRVQELLQLWPQISSQGIQPPGPWKTLVTRAEVFLTPQFSPEPIPAALCLFSDGAARRGAYCLWKDHLLDFQAVPAPESAQKGELAGLLAGLAAAPPEPLNIWVDSKYLYSLLRTLVLGAWLQPDPVPSYALLYKSLLRHPAIFVGHVRSHSSASHPIASLNNYVDQL

SEQ ID NO: 3144 - protein, 576 aa, synthetic construct
  source 1..576: note = Description of Artificial Sequence: Synthetic polypeptide
GVLDAPPSHIGLEHLPPPPEVPQFPLNLERLQALQDLVHRSLEAGYISPWDGPGNNPVFPVRKPNGAWRFVHDLRVTNALTKPIPALSPGPPDLTAPPTHLPHIICLDLKDAFFQIPVEDRFRSYFAFTLPTPGGLQPHRRFAWRVLPQGFINSPALFQRALQEPLRQVSAAFSQSLLVSYMDDILYVSPTEEQRLQCYQTMAAHLRDLGFQVASEKTRQTPSPVPFLGQMVHERMVTYQSLPTLQISSPISLHQLQTVLGDLQWVSRGTPTTRRPLQLLYSSLKPIDDPRAIIHLSPEQQQGIAELRQALSHNARSRYNEQEPLLAYVHLTRAGSTLVLFQKGAQFPLAYFQTPLTDNQASPWGLLLLLGCQYLQAQALSSYAKTILKYYHNLPKTSLDNWIQSSEDPRVQELLQLWPQISSQGIQPPGPWKTLVTRAEVFLTPQFSPEPIPAALCLFSDGAARRGAYCLWKDHLLDFQAVPAPESAQKGELAGLLAGLAAAPPEPLNIWVDSKYLYSLLRTLVLGAWLQPDPVPSYALLYKSLLRHPAIFVGHVRSHSSASHPIASLNNYVDQL

SEQ ID NO: 3145 - protein, 576 aa, synthetic construct
  source 1..576: note = Description of Artificial Sequence: Synthetic polypeptide
GVLDTPPSHIGLEHLPPPPEVPQFPLNLERLQALQDLVHRSLEAGYISPWDGPGNNPVFPVRKPNGAWRFVHDLRATNALTKPIPALSPGPPDLTAIPTHPPHIICLDLKDAFFQIPVEDRFRFYLSFTLPSPGGLQPHRRFAWRVLPQGFINSPALFERALQEPLRQVSAAFSQSLLVSYMDDILYASPTEEQRSQCYQALAARLRDLGFQVASEKTSQTPSPVPFLGQMVHEQIVTYQSLPTLQISSPISLHQLQAVLGDLQWVSRGTPTTRRPLQLLYSSLKRHHDPRAIIQLSPEQLQGIAELRQALSHNARSRYNEQEPLLAYVHLTRAGSTLVLFQKGAQFPLAYFQTPLTDNQASPWGLLLLLGCQYLQTQALSSYAKPILKYYHNLPKTSLDNWIQSSEDPRVQELLQLWPQISSQGIQPPGPWKTLITRAEVFLTPQFSPDPIPAALCLFSDGATGRGAYCLWKDHLLDFQAVPAPESAQKGELAGLLAGLAAAPPEPVNIWVDSKYLYSLLRTLVLGAWLQPDPVPSYALLYKSLLRHPAIVVGHVRSHSSASHPIASLNNYVDQL

SEQ ID NO: 3146 - protein, 576 aa, synthetic construct
  source 1..576: note = Description of Artificial Sequence: Synthetic polypeptide
GVLDTPPSHIGLEHLPPPPEVPQFPLNLERLQALQDLVHRSLEAGYISPWDGPGNNPVFPVRKPNGAWRFVHDLRATNALTKPIPALSPGPPDLTAIPTHPPHIICLDLKDAFFQIPVEDRFRFYLSFTLPSPGGLQPHRRFAWRVLPQGFINSPALFNRALQEPLRQVSAAFSQSLLVSYMDDILYASPTEEQRSQCYQALAARLRDLGFQVASEKTSQTPSPVPFLGQMVHEQIVTYQSLPTLQISSPISLHQLQAVLGDLQWVSRGTPTTRRPLQLLYSSLKRHHDPRAIIQLSPEQLQGIAELRQALSHNARSRYNEQEPLLAYVHLTRAGSTLVLFQKGAQFPLAYFQTPLTDNQASPWGLLLLLGCQYLQTQALSSYAKPILKYYHNLPKTSLDNWIQSSEDPRVQELLQLWPQISSQGIQPPGPWKTLITRAEVFLTPQFSPDPIPAALCLFSDGATGRGAYCLWKDHLLDFQAVPAPESAQKGELAGLLAGLAAAPPEPVNIWVDSKYLYSLLRTWVLGAWLQPDPVPSYALLYKSLLRHPAIVVGHVRSHSSASHPIASLNNYVDQL

SEQ ID NO: 3147 - protein, 576 aa, synthetic construct
  source 1..576: note = Description of Artificial Sequence: Synthetic polypeptide
GVLDTPPSHIGLEHLPPPPEVPQFPLNLERLQALQDLVHRSLEAGYISPWDGPGNNPVFPVRKPNGAWRFVHDLRATNALTKPIPALSPGPPDLTAPPTHPPHIICLDLKDAFFQIPVEDRFRFYLSFTLPSPGGLQPHRRFAWRVLPQGFINSPALFQRALQEPLRQVSAAFSQSLLVSYMDDILYASPTEEQRSQCYQALAARLRDLGFQVASEKTSQTPSPVPFLGQMVHEQIVTYQSLPTLQISSPISLHQLQAVLGDLQWVSRGTPTTRRPLQLLYSSLKRHHDPRAIIQLSPEQLQGIAELRQALSHNARSRYNEQEPLLAYVHLTRAGSTLVLFQKGAQFPLAYFQTPLTDNQASPWGLLLLLGCQYLQTQALSSYAKPILKYYHNLPKTSLDNWIQSSEDPRVQELLQLWPQISSQGIQPPGPWKTLITRAEVFLTPQFSPDPIPAALCLFSDGATGRGAYCLWKDHLLDFQAVPAPESAQKGELAGLLAGLAAAPPEPVNIWVDSKYLYSLLRTWVLGAWLQPDPVPSYALLYKSLLRHPAIVVGHVRSHSSASHPIASLNNYVDQL

SEQ ID NO: 3148 - protein, 748 aa, synthetic construct
  source 1..748: note = Description of Artificial Sequence: Synthetic polypeptide
MDLLKPLTVERKGVKIKGYWNSQADITCVPKDLLQGEEPVRQQNVTTIHGTQEGDVYYVNLKIDGRRINTEVIGTTLDYAIITPGDVPWILKKPLELTIKLDLEEQQGTLLNNSILSKKGKEELKQLFEKYSALWQSWENQVGHRRIRPHKIATGTVKPTPQKQYHINPKAKPDIQIVINDLLKQGVLIQKESTMNTPVYPVPKPNGRWRMVLDYRAVNKVTPLIAVQNQHSYGILGSLFKGRYKTTIDLSNGFWAHPIVPEDYWITAFTWQGKQYCWTVLPQGFLNSPGLFTGDVVDLLQGIPNVEVYVDDVYISHDSEKEHLEYLDILFNRLKEAGYIISLKKSNIANSIVDFLGFQITNEGRGLTDTFKEKLENITAPTTLKQLQSILGLLNFARNFIPDFTELIAPLYALIPKSTKNYVPWQIEHSTTLETLITKLNGAEYLQGRKGDKTLIMKVNASYTTGYIRYYNEGEKKPISYVSIVFSKTELKFTELEKLLTTVHKGLLKALDLSMGQNIHVYSPIVSMQNIQKTPQTAKKALASRWLSWLSYLEDPRIRFFYDPQMPALKDLPAVDTGKDNKKHPSNFQHIFYTDGSAITSPTKEGHLNAGMGIVYFINKDGNLQKQQEWSISLGNHTAQFAEIAAFEFALKKCLPLGGNILVVTDSNYVAKAYNEELDVWASNGFVNNRKKPLKHISKWKSVADLKRLRPDVVVTHEPGHQKLDSSPHAYGNNLADQLATQASFKVH

SEQ ID NO: 3149 - protein, 662 aa, synthetic construct
  source 1..662: note = Description of Artificial Sequence: Synthetic polypeptide
VPWILKKPLELTIKLDLEEQQGTLLNNSILSKKGKEELKQLFEKYSALWQSWENQVGHRRIRPHKIATGTVKPTPQKQYHINPKAKPDIQIVINDLLKQGVLIQKESTMNTPVYPVPKPNGRWRMVLDYRAVNKVTPLIAVQNQHSYGILGSLFKGRYKTTIDLSNGFWAHPIVPEDYWITAFTWQGKQYCWTVLPQGFLNSPGLFTGDVVDLLQGIPNVEVYVDDVYISHDSEKEHLEYLDILFNRLKEAGYIISLKKSNIANSIVDFLGFQITNEGRGLTDTFKEKLENITAPTTLKQLQSILGLLNFARNFIPDFTELIAPLYALIPKSTKNYVPWQIEHSTTLETLITKLNGAEYLQGRKGDKTLIMKVNASYTTGYIRYYNEGEKKPISYVSIVFSKTELKFTELEKLLTTVHKGLLKALDLSMGQNIHVYSPIVSMQNIQKTPQTAKKALASRWLSWLSYLEDPRIRFFYDPQMPALKDLPAVDTGKDNKKHPSNFQHIFYTDGSAITSPTKEGHLNAGMGIVYFINKDGNLQKQQEWSISLGNHTAQFAEIAAFEFALKKCLPLGGNILVVTDSNYVAKAYNEELDVWASNGFVNNRKKPLKHISKWKSVADLKRLRPDVVVTHEPGHQKLDSSPHAYGNNLADQLATQASFKVH

SEQ ID NO: 3150 - protein, 662 aa, synthetic construct
  source 1..662: note = Description of Artificial Sequence: Synthetic polypeptide
VPWILKKPLELTIKLDLEEQQGTLLNNSILSKKGKEELKQLFEKYSALWQSWENQVGHRRIRPHKIATGTVKPTPQKQYHINPKAKPDIQIVINDLLKQGVLIQKESTMNTPVYPVPKPNGRWRMVLDYRAVNKVTPLIAVQNQHSYGILGSLFKGRYKTTIDLSNGFWAHPIVPEDYWITAFTWQGKQYCWTVLPQGFLNSPGLFNGDVVDLLQGIPNVEVYVDDVYISHDSEKEHLEYLDILFNRLKEAGYIISLKKSNIANSIVDFLGFQITNEGRGLTDTFKEKLENITAPTTLKQLQSILGLLNFARNFIPDFTELIAPLYALIPKSPKNYVPWQIEHSTTLETLITKLNGAEYLQGRKGDKTLIMKVNASYTTGYIRYYNEGEKKPISYVSIVFSKTELKFTELEKLLTTVHKGLLKALDLSMGQNIHVYSPIVSMQNIQKTPQTAKKALASRWLSWLSYLEDPRIRFFYDPQMPALKDLPAVDTGKDNKKHPSNFQHIFYTDGSAITSPTKEGHLNAGMGIVYFINKDGNLQKQQEWSISLGNHTAQFAEIAAFEFALKKCLPLGGNILVVTDSNYVAKAYNEELDVWASNGFVNNRKKPLKHISKWKSVADLKRLRPDVVVTHEPGHQKLDSSPHAYGNNLADQLATQASFKVH

SEQ ID NO: 3151 - protein, 662 aa, synthetic construct
  source 1..662: note = Description of Artificial Sequence: Synthetic polypeptide
VPWILKKPLELTIKLDLEEQQGTLLNNSILSKKGKEELKQLFEKYSALWQSWENQVGHRRIRPHKIATGTVKPTPQKQYHINPKAKPDIQIVINDLLKQGVLIQKESTMNTPVYPVPKPNGRWRMVLDYRAVNKVTPLIAVQNQHSYGILGSLFKGRYKTTIDLSNGFWAHPIVPEDYWITAFTWQGKQYCWTVLPQGFLNSPGLFNGDVVDLLQGIPNVEVYVDDVYISHDSEKEHLEYLDILFNRLKEAGYIISLKKSNIANSIVDFLGFQITNEGRGLTDTFKEKLENITAPTTLKQLQSILGKLNFARNFIPDFTELIAPLYALIPKSPKNYVPWQIEHSTTLETLITKLNGAEYLQGRKGDKTLIMKVNASYTTGYIRYYNEGEKKPISYVSIVFSKTELKFTELEKLLTTVHKGLLKALDLSMGQNIHVYSPIVSMQNIQKTPQTAKKALASRWLSWLSYLEDPRIRFFYDPQMPALKDLPAVDTGKDNKKHPSNFQHIFYTDGSAITSPTKEGHLNAGMGIVYFINKDGNLQKQQEWSISLGNHTAQFAEIAAFEFALKKCLPLGGNILVVTDSNYVAKAYNEELDVWASNGFVNNRKKPLKHISKWKSVADLKRLRPDVVVTHEPGHQKLDSSPHAYGNNLADQLATQASFKVH

SEQ ID NO: 3152 - protein, 748 aa, synthetic construct
  source 1..748: note = Description of Artificial Sequence: Synthetic polypeptide
MDLLKPLTVERKGVKIKGYWNSQADITCVPKDLLQGEEPVRQQNVTTIHGTQEGDVYYVNLKIDGRRINTEVIGTTLDYAIITPGDVPWILKKPLELTIKLDLEEQQGTLLNNSILSKKGKEELKQLFEKYSALWQSWENQVGHRRIRPHKIATGTVKPTPQKQYHINPKAKPDIQIVINDLLKQGVLIQKESTMNTPVYPVPKPNGRWRMVLDYRAVNKVTPLIAVQNQHSYGILGSLFKGRYKTTIDLSNGFWAHPIVPEDYWITAFTWQGKQYCWTVLPQGFLNSPGLFNGDVVDLLQGIPNVEVYVDDVYISHDSEKEHLEYLDILFNRLKEAGYIISLKKSNIANSIVDFLGFQITNEGRGLTDTFKEKLENITAPTTLKQLQSILGLLNFARNFIPDFTELIAPLYALIPKSPKNYVPWQIEHSTTLETLITKLNGAEYLQGRKGDKTLIMKVNASYTTGYIRYYNEGEKKPISYVSIVFSKTELKFTELEKLLTTVHKGLLKALDLSMGQNIHVYSPIVSMQNIQKTPQTAKKALASRWLSWLSYLEDPRIRFFYDPQMPALKDLPAVDTGKDNKKHPSNFQHIFYTDGSAITSPTKEGHLNAGMGIVYFINKDGNLQKQQEWSISLGNHTAQFAEIAAFEFALKKCLPLGGNILVVTDSNYVAKAYNEELDVWASNGFVNNRKKPLKHISKWKSVADLKRLRPDVVVTHEPGHQKLDSSPHAYGNNLADQLATQASFKVH

SEQ ID NO: 3153 - protein, 748 aa, synthetic construct
  source 1..748: note = Description of Artificial Sequence: Synthetic polypeptide
MDLLKPLTVERKGVKIKGYWNSQADITCVPKDLLQGEEPVRQQNVTTIHGTQEGDVYYVNLKIDGRRINTEVIGTTLDYAIITPGDVPWILKKPLELTIKLDLEEQQGTLLNNSILSKKGKEELKQLFEKYSALWQSWENQVGHRRIRPHKIATGTVKPTPQKQYHINPKAKPDIQIVINDLLKQGVLIQKESTMNTPVYPVPKPNGRWRMVLDYRAVNKVTPLIAVQNQHSYGILGSLFKGRYKTTIDLSNGFWAHPIVPEDYWITAFTWQGKQYCWTVLPQGFLNSPGLFNGDVVDLLQGIPNVEVYVDDVYISHDSEKEHLEYLDILFNRLKEAGYIISLKKSNIANSIVDFLGFQITNEGRGLTDTFKEKLENITAPTTLKQLQSILGKLNFARNFIPDFTELIAPLYALIPKSPKNYVPWQIEHSTTLETLITKLNGAEYLQGRKGDKTLIMKVNASYTTGYIRYYNEGEKKPISYVSIVFSKTELKFTELEKLLTTVHKGLLKALDLSMGQNIHVYSPIVSMQNIQKTPQTAKKALASRWLSWLSYLEDPRIRFFYDPQMPALKDLPAVDTGKDNKKHPSNFQHIFYTDGSAITSPTKEGHLNAGMGIVYFINKDGNLQKQQEWSISLGNHTAQFAEIAAFEFALKKCLPLGGNILVVTDSNYVAKAYNEELDVWASNGFVNNRKKPLKHISKWKSVADLKRLRPDVVVTHEPGHQKLDSSPHAYGNNLADQLATQASFKVH

SEQ ID NO: 3154 - protein, 670 aa, synthetic construct
  source 1..670: note = Description of Artificial Sequence: Synthetic polypeptide
TLQLEEEYRLFEPESTQKQEMDIWLKNFPQAWAETGGMGTAHCQAPVLIQLKATATPISIRQYPMPHEAYQGIKPHIRRMLDQGILKPCQSPWNTPLLPVKKPGTEDYRPVQDLREVNKRVEDIHPTVPNPYNLLSTLPPSHPWYTVLDLKDAFFCLRLHSESQLLFAFEWRDPEIGLSGQLTWTRLPQGFKNSPTLFDEALHSDLADFRVRYPALVLLQYVDDLLLAAATRTECLEGTKALLETLGNKGYRASAKKAQICLQEVTYLGYSLKDGQRWLTKARKEAILSIPVPKNSRQVREFLGTAGYCRLWIPGFAELAAPLYPLTRPGTLFQWGTEQQLAFEDIKKALLSSPALGLPDITKPFELFIDENSGFAKGVLVQKLGPWKRPVAYLSKKLDTVASGWPPCLRMVAAIAILVKDAGKLTLGQPLTILTSHPVEALVRQPPNKWLSNARMTHYQAMLLDAERVHFGPTVSLNPATLLPLPSGGNHHDCLQILAETHGTRPDLTDQPLPDADLTWYTDGSSFIRNGEREAGAAVTTESEVIWAAPLPPGTSAQRAELIALTQALKMAEGKKLTVYTDSRYAFATTHVHGEIYRRRGLLTSEGKEIKNKNEILALLEALFLPKRLSIIHCPGHQKGDSPQAKGNRLADDTAKKAATETHSSLTVLP

SEQ ID NO: 3155 - protein, 670 aa, synthetic construct
  source 1..670: note = Description of Artificial Sequence: Synthetic polypeptide
TLQLEEEYRLFEPESTQKQEMDIWLKNFPQAWAETGGMGTAHCQAPVLIQLKATATPISIRQYPMPHEAYQGIKPHIRRMLDQGILKPCQSPWNTPLLPVKKPGTEDYRPVQDLREVNKRVEDIHPTVPNPYNLLSTLPPSHPWYTVLDLKDAFFCLRLHSESQLLFAFEWRDPEIGLSGQLTWTRLPQGFKNSPTLFNEALHSDLADFRVRYPALVLLQYVDDLLLAAATRTECLEGTKALLETLGNKGYRASAKKAQICLQEVTYLGYSLKDGQRWLTKARKEAILSIPVPKNSRQVREFLGTAGYCRLWIPGFAELAAPLYPLTRPGTLFQWGTEQQLAFEDIKKALLSSPALGLPDITKPFELFIDENSGFAKGVLVQKLGPWKRPVAYLSKKLDTVASGWPPCLRMVAAIAILVKDAGKLTLGQPLTILTSHPVEALVRQPPNKWLSNARMTHYQAMLLDAERVHFGPTVSLNPATLLPLPSGGNHHDCLQILAETHGTRPDLTDQPLPDADLTWYTDGSSFIRNGEREAGAAVTTESEVIWAAPLPPGTSAQRAELIALTQALKMAEGKKLTVYTDSRYAFATTHVHGEIYRRRGWLTSEGKEIKNKNEILALLEALFLPKRLSIIHCPGHQKGDSPQAKGNRLADDTAKKAATETHSSLTVLP

SEQ ID NO: 3156 - protein, 670 aa, synthetic construct
  source 1..670: note = Description of Artificial Sequence: Synthetic polypeptide
TLQLEEEYRLFEPESTQKQEMDIWLKNFPQAWAETGGMGTAHCQAPVLIQLKATATPISIRQYPMPHEAYQGIKPHIRRMLDQGILKPCQSPWNTPLLPVKKPGTEDYRPVQDLREVNKRVEDIHPTVPNPYNLLSTLPPSHPWYTVLDLKDAFFCLRLHSESQLLFAFEWRDPEIGLSGQLTWTRLPQGFKNSPTLFNEALHSDLADFRVRYPALVLLQYVDDLLLAAATRTECLEGTKALLETLGNKGYRASAKKAQICLQEVTYLGYSLKDGQRWLTKARKEAILSIPVPKNSRQVREFLGKAGYCRLFIPGFAELAAPLYPLTRPGTLFQWGTEQQLAFEDIKKALLSSPALGLPDITKPFELFIDENSGFAKGVLVQKLGPWKRPVAYLSKKLDTVASGWPPCLRMVAAIAILVKDAGKLTLGQPLTILTSHPVEALVRQPPNKWLSNARMTHYQAMLLDAERVHFGPTVSLNPATLLPLPSGGNHHDCLQILAETHGTRPDLTDQPLPDADLTWYTDGSSFIRNGEREAGAAVTTESEVIWAAPLPPGTSAQRAELIALTQALKMAEGKKLTVYTDSRYAFATTHVHGEIYRRRGWLTSEGKEIKNKNEILALLEALFLPKRLSIIHCPGHQKGDSPQAKGNRLADDTAKKAATETHSSLTVLP

SEQ ID NO: 3157 - protein, 751 aa, synthetic construct
  source 1..751: note = Description of Artificial Sequence: Synthetic polypeptide
MNPLQLLQPLPAEIKGTKLLAHWNSGATITCIPESFLEDEQPIKKTLIKTIHGEKQQNVYYVTFKVKGRKVEAEVIASPYEYILLSPTDVPWLTQQPLQLTILVPLQEYQEKILSKTALPEDQKQQLKTLFVKYDNLWQHWENQVGHRKIRPHNIATGDYPPRPQKQYPINPKAKPSIQIVIDDLLKQGVLTPQNSTMNTPVYPVPKPDGRWRMVLDYREVNKTIPLTAAQNQHSAGILATIVRQKYKTTLDLANGFWAHPITPESYWLTAFTWQGKQYCWTRLPQGFLNSPALFTADVVDLLKEIPNVQVYVDDIYLSHDDPKEHVQQLEKVFQILLQAGYVVSLKKSEIGQKTVEFLGFNITKEGRGLTDTFKTKLLNITPPKDLKQLQSILGLLNFARNFIPNFAELVQPLYNLIASAKGKYIEWSEENTKQLNMVIEALNTASNLEERLPEQRLVIKVNTSPSAGYVRYYNETGKKPIMYLNYVFSKAELKFSMLEKLLTTMHKALIKAMDLAMGQEILVYSPIVSMTKIQKTPLPERKALPIRWITWMTYLEDPRIQFHYDKTLPELKHIPDVYTSSQSPVKHPSQYEGVFYTDGSAIKSPDPTKSNNAGMGIVHATYKPEYQVLNQWSIPLGNHTAQMAEIAAVEFACKKALKIPGPVLVITDSFYVAESANKELPYWKSNGFVNNKKKPLKHISKWKSIAECLSMKPDITIQHEKGISLQIPVFILKGNALADKLATQGSYVVN

SEQ ID NO: 3158 - protein, 662 aa, synthetic construct
  source 1..662: note = Description of Artificial Sequence: Synthetic polypeptide
VPWLTQQPLQLTILVPLQEYQEKILSKTALPEDQKQQLKTLFVKYDNLWQHWENQVGHRKIRPHNIATGDYPPRPQKQYPINPKAKPSIQIVIDDLLKQGVLTPQNSTMNTPVYPVPKPDGRWRMVLDYREVNKTIPLTAAQNQHSAGILATIVRQKYKTTLDLANGFWAHPITPESYWLTAFTWQGKQYCWTRLPQGFLNSPALFTADVVDLLKEIPNVQVYVDDIYLSHDDPKEHVQQLEKVFQILLQAGYVVSLKKSEIGQKTVEFLGFNITKEGRGLTDTFKTKLLNITPPKDLKQLQSILGLLNFARNFIPNFAELVQPLYNLIASAKGKYIEWSEENTKQLNMVIEALNTASNLEERLPEQRLVIKVNTSPSAGYVRYYNETGKKPIMYLNYVFSKAELKFSMLEKLLTTMHKALIKAMDLAMGQEILVYSPIVSMTKIQKTPLPERKALPIRWITWMTYLEDPRIQFHYDKTLPELKHIPDVYTSSQSPVKHPSQYEGVFYTDGSAIKSPDPTKSNNAGMGIVHATYKPEYQVLNQWSIPLGNHTAQMAEIAAVEFACKKALKIPGPVLVITDSFYVAESANKELPYWKSNGFVNNKKKPLKHISKWKSIAECLSMKPDITIQHEKGISLQIPVFILKGNALADKLATQGSYVVN

SEQ ID NO: 3159 - protein, 662 aa, synthetic construct
  source 1..662: note = Description of Artificial Sequence: Synthetic polypeptide
VPWLTQQPLQLTILVPLQEYQEKILSKTALPEDQKQQLKTLFVKYDNLWQHWENQVGHRKIRPHNIATGDYPPRPQKQYPINPKAKPSIQIVIDDLLKQGVLTPQNSTMNTPVYPVPKPDGRWRMVLDYREVNKTIPLTAAQNQHSAGILATIVRQKYKTTLDLANGFWAHPITPESYWLTAFTWQGKQYCWTRLPQGFLNSPALFNADVVDLLKEIPNVQVYVDDIYLSHDDPKEHVQQLEKVFQILLQAGYVVSLKKSEIGQKTVEFLGFNITKEGRGLTDTFKTKLLNITPPKDLKQLQSILGLLNFARNFIPNFAELVQPLYNLIAPAKGKYIEWSEENTKQLNMVIEALNTASNLEERLPEQRLVIKVNTSPSAGYVRYYNETGKKPIMYLNYVFSKAELKFSMLEKLLTTMHKALIKAMDLAMGQEILVYSPIVSMTKIQKTPLPERKALPIRWITWMTYLEDPRIQFHYDKTLPELKHIPDVYTSSQSPVKHPSQYEGVFYTDGSAIKSPDPTKSNNAGMGIVHATYKPEYQVLNQWSIPLGNHTAQMAEIAAVEFACKKALKIPGPVLVITDSFYVAESANKELPYWKSNGFVNNKKKPLKHISKWKSIAECLSMKPDITIQHEKGISLQIPVFILKGNALADKLATQGSYVVN

SEQ ID NO: 3160 - protein, 662 aa, synthetic construct
  source 1..662: note = Description of Artificial Sequence: Synthetic polypeptide
VPWLTQQPLQLTILVPLQEYQEKILSKTALPEDQKQQLKTLFVKYDNLWQHWENQVGHRKIRPHNIATGDYPPRPQKQYPINPKAKPSIQIVIDDLLKQGVLTPQNSTMNTPVYPVPKPDGRWRMVLDYREVNKTIPLTAAQNQHSAGILATIVRQKYKTTLDLANGFWAHPITPESYWLTAFTWQGKQYCWTRLPQGFLNSPALFNADVVDLLKEIPNVQVYVDDIYLSHDDPKEHVQQLEKVFQILLQAGYVVSLKKSEIGQKTVEFLGFNITKEGRGLTDTFKTKLLNITPPKDLKQLQSILGKLNFARNFIPNFAELVQPLYNLIAPAKGKYIEWSEENTKQLNMVIEALNTASNLEERLPEQRLVIKVNTSPSAGYVRYYNETGKKPIMYLNYVFSKAELKFSMLEKLLTTMHKALIKAMDLAMGQEILVYSPIVSMTKIQKTPLPERKALPIRWITWMTYLEDPRIQFHYDKTLPELKHIPDVYTSSQSPVKHPSQYEGVFYTDGSAIKSPDPTKSNNAGMGIVHATYKPEYQVLNQWSIPLGNHTAQMAEIAAVEFACKKALKIPGPVLVITDSFYVAESANKELPYWKSNGFVNNKKKPLKHISKWKSIAECLSMKPDITIQHEKGISLQIPVFILKGNALADKLATQGSYVVN

SEQ ID NO: 3161 - protein, 751 aa, synthetic construct
  source 1..751: note = Description of Artificial Sequence: Synthetic polypeptide
MNPLQLLQPLPAEIKGTKLLAHWNSGATITCIPESFLEDEQPIKKTLIKTIHGEKQQNVYYVTFKVKGRKVEAEVIASPYEYILLSPTDVPWLTQQPLQLTILVPLQEYQEKILSKTALPEDQKQQLKTLFVKYDNLWQHWENQVGHRKIRPHNIATGDYPPRPQKQYPINPKAKPSIQIVIDDLLKQGVLTPQNSTMNTPVYPVPKPDGRWRMVLDYREVNKTIPLTAAQNQHSAGILATIVRQKYKTTLDLANGFWAHPITPESYWLTAFTWQGKQYCWTRLPQGFLNSPALFNADVVDLLKEIPNVQVYVDDIYLSHDDPKEHVQQLEKVFQILLQAGYVVSLKKSEIGQKTVEFLGFNITKEGRGLTDTFKTKLLNITPPKDLKQLQSILGLLNFARNFIPNFAELVQPLYNLIAPAKGKYIEWSEENTKQLNMVIEALNTASNLEERLPEQRLVIKVNTSPSAGYVRYYNETGKKPIMYLNYVFSKAELKFSMLEKLLTTMHKALIKAMDLAMGQEILVYSPIVSMTKIQKTPLPERKALPIRWITWMTYLEDPRIQFHYDKTLPELKHIPDVYTSSQSPVKHPSQYEGVFYTDGSAIKSPDPTKSNNAGMGIVHATYKPEYQVLNQWSIPLGNHTAQMAEIAAVEFACKKALKIPGPVLVITDSFYVAESANKELPYWKSNGFVNNKKKPLKHISKWKSIAECLSMKPDITIQHEKGISLQIPVFILKGNALADKLATQGSYVVN

SEQ ID NO: 3162 - protein, 751 aa, synthetic construct
  source 1..751: note = Description of Artificial Sequence: Synthetic polypeptide
MNPLQLLQPLPAEIKGTKLLAHWNSGATITCIPESFLEDEQPIKKTLIKTIHGEKQQNVYYVTFKVKGRKVEAEVIASPYEYILLSPTDVPWLTQQPLQLTILVPLQEYQEKILSKTALPEDQKQQLKTLFVKYDNLWQHWENQVGHRKIRPHNIATGDYPPRPQKQYPINPKAKPSIQIVIDDLLKQGVLTPQNSTMNTPVYPVPKPDGRWRMVLDYREVNKTIPLTAAQNQHSAGILATIVRQKYKTTLDLANGFWAHPITPESYWLTAFTWQGKQYCWTRLPQGFLNSPALFNADVVDLLKEIPNVQVYVDDIYLSHDDPKEHVQQLEKVFQILLQAGYVVSLKKSEIGQKTVEFLGFNITKEGRGLTDTFKTKLLNITPPKDLKQLQSILGKLNFARNFIPNFAELVQPLYNLIAPAKGKYIEWSEENTKQLNMVIEALNTASNLEERLPEQRLVIKVNTSPSAGYVRYYNETGKKPIMYLNYVFSKAELKFSMLEKLLTTMHKALIKAMDLAMGQEILVYSPIVSMTKIQKTPLPERKALPIRWITWMTYLEDPRIQFHYDKTLPELKHIPDVYTSSQSPVKHPSQYEGVFYTDGSAIKSPDPTKSNNAGMGIVHATYKPEYQVLNQWSIPLGNHTAQMAEIAAVEFACKKALKIPGPVLVITDSFYVAESANKELPYWKSNGFVNNKKKPLKHISKWKSIAECLSMKPDITIQHEKGISLQIPVFILKGNALADKLATQGSYVVN

SEQ ID NO: 3163 - protein, 669 aa, synthetic construct
  source 1..669: note = Description of Artificial Sequence: Synthetic polypeptide
VLNLEEEYRLHEKPVPSSIDPSWLQLFPTVWAERAGMGLANQVPPVVVELRSGASPVAVRQYPMSKEAREGIRPHIQKFLDLGVLVPCRSPWNTPLLPVKKPGTNDYRPVQDLREINKRVQDIHPTVPNPYNLLSSLPPSYTWYSVLDLKDAFFCLRLHPNSQPLFAFEWKDPEKGNTGQLTWTRLPQGFKNSPTLFDEALHRDLAPFRALNPQVVLLQYVDDLLVAAPTYEDCKKGTQKLLQELSKLGYRVSAKKAQLCQREVTYLGYLLKEGKRWLTPARKATVMKIPVPTTPRQVREFLGTAGFCRLWIPGFASLAAPLYPLTKESIPFIWTEEHQQAFDHIKKALLSAPALALPDLTKPFTLYIDERAGVARGVLTQTLGPWRRPVAYLSKKLDPVASGWPTCLKAVAAVALLLKDADKLTLGQNVTVIASHSLESIVRQPPDRWMTNARMTHYQSLLLNERVSFAPPAVLNPATLLPVESEATPVHRCSEILAEETGTRRDLEDQPLPGVPTWYTDGSSFITEGKRRAGAPIVDGKRTVWASSLPEGTSAQKAELVALTQALRLAEGKNINIYTDSRYAFATAHIHGAIYKQRGLLTSAGKDIKNKEEILALLEAIHLPRRVAIIHCPGHQRGSNPVATGNRRADEAAKQAALSTRVLAGTTKP

SEQ ID NO: 3164 - protein, 669 aa, synthetic construct
  source 1..669: note = Description of Artificial Sequence: Synthetic polypeptide
VLNLEEEYRLHEKPVPSSIDPSWLQLFPTVWAERAGMGLANQVPPVVVELRSGASPVAVRQYPMSKEAREGIRPHIQKFLDLGVLVPCRSPWNTPLLPVKKPGTNDYRPVQDLREINKRVQDIHPTVPNPYNLLSSLPPSYTWYSVLDLKDAFFCLRLHPNSQPLFAFEWKDPEKGNTGQLTWTRLPQGFKNSPTLFNEALHRDLAPFRALNPQVVLLQYVDDLLVAAPTYEDCKKGTQKLLQELSKLGYRVSAKKAQLCQREVTYLGYLLKEGKRWLTPARKATVMKIPVPTTPRQVREFLGTAGFCRLWIPGFASLAAPLYPLTKPSIPFIWTEEHQQAFDHIKKALLSAPALALPDLTKPFTLYIDERAGVARGVLTQTLGPWRRPVAYLSKKLDPVASGWPTCLKAVAAVALLLKDADKLTLGQNVTVIASHSLESIVRQPPDRWMTNARMTHYQSLLLNERVSFAPPAVLNPATLLPVESEATPVHRCSEILAEETGTRRDLEDQPLPGVPTWYTDGSSFITEGKRRAGAPIVDGKRTVWASSLPEGTSAQKAELVALTQALRLAEGKNINIYTDSRYAFATAHIHGAIYKQRGWLTSAGKDIKNKEEILALLEAIHLPRRVAIIHCPGHQRGSNPVATGNRRADEAAKQAALSTRVLAGTTKP

SEQ ID NO: 3165 - protein, 669 aa, synthetic construct
  source 1..669: note = Description of Artificial Sequence: Synthetic polypeptide
VLNLEEEYRLHEKPVPSSIDPSWLQLFPTVWAERAGMGLANQVPPVVVELRSGASPVAVRQYPMSKEAREGIRPHIQKFLDLGVLVPCRSPWNTPLLPVKKPGTNDYRPVQDLREINKRVQDIHPTVPNPYNLLSSLPPSYTWYSVLDLKDAFFCLRLHPNSQPLFAFEWKDPEKGNTGQLTWTRLPQGFKNSPTLFNEALHRDLAPFRALNPQVVLLQYVDDLLVAAPTYEDCKKGTQKLLQELSKLGYRVSAKKAQLCQREVTYLGYLLKEGKRWLTPARKATVMKIPVPTTPRQVREFLGKAGFCRLFIPGFASLAAPLYPLTKPSIPFIWTEEHQQAFDHIKKALLSAPALALPDLTKPFTLYIDERAGVARGVLTQTLGPWRRPVAYLSKKLDPVASGWPTCLKAVAAVALLLKDADKLTLGQNVTVIASHSLESIVRQPPDRWMTNARMTHYQSLLLNERVSFAPPAVLNPATLLPVESEATPVHRCSEILAEETGTRRDLEDQPLPGVPTWYTDGSSFITEGKRRAGAPIVDGKRTVWASSLPEGTSAQKAELVALTQALRLAEGKNINIYTDSRYAFATAHIHGAIYKQRGWLTSAGKDIKNKEEILALLEAIHLPRRVAIIHCPGHQRGSNPVATGNRRADEAAKQAALSTRVLAGTTKP

SEQ ID NO: 3166 - protein, 588 aa, synthetic construct
  source 1..588: note = Description of Artificial Sequence: Synthetic polypeptide
AVLGLEHLPRPPQISQFPLNPERLQALQHLVRKALEAGHIEPYTGPGNNPVFPVKKANGTWRFIHDLRATNSLTIDLSSSSPGPPDLSSLPTTLAHLQTIDLRDAFFQIPLPKQFQPYFAFTVPQQCNYGPGTRYAWKVLPQGFKNSPTLFEMQLAHILQPIRQAFPQCTILQYMDDILLASPSHEDLLLLSEATMASLISHGLPVSENKTQQTPGTIKFLGQIISPNHLTYDAVPTVPIRSRWALPELQALLGEIQWVSKGTPTLRQPLHSLYCALQRHTDPRDQIYLNPSQVQSLVQLRQALSQNCRSRLVQTLPLLGAIMLTLTGTTTVVFQSKEQWPLVWLHAPLPHTSQCPWGQLLASAVLLLDKYTLQSYGLLCQTIHHNISTQTFNQFIQTSDHPSVPILLHHSHRFKNLGAQTGELWNTFLKTAAPLAPVKALMPVFTLSPVIINTAPCLFSDGSTSRAAYILWDKQILSQRSFPLPPPHKSAQRAELLGLLHGLSSARSWRCLNIFLDSKYLYHYLRTLALGTFQGRSSQAPFQALLPRLLSRKVVYLHHVRSHTNLPDPISRLNALTDALLITPVLQL

SEQ ID NO: 3167 - protein, 588 aa, synthetic construct
  source 1..588: note = Description of Artificial Sequence: Synthetic polypeptide
AVLGLEHLPRPPQISQFPLNPERLQALQHLVRKALEAGHIEPYTGPGNNPVFPVKKANGTWRFIHDLRATNSLTIDLSSSSPGPPDLSSLPTTLAHLQTIDLRDAFFQIPLPKQFQPYFAFTVPQQCNYGPGTRYAWKVLPQGFKNSPTLFQMQLAHILQPIRQAFPQCTILQYMDDILLASPSHEDLLLLSEATMASLISHGLPVSENKTQQTPGTIKFLGQIISPNHLTYDAVPTVPIRSRWALPELQALLGEIQWVSKGTPTLRQPLHSLYCALQPHTDPRDQIYLNPSQVQSLVQLRQALSQNCRSRLVQTLPLLGAIMLTLTGTTTVVFQSKEQWPLVWLHAPLPHTSQCPWGQLLASAVLLLDKYTLQSYGLLCQTIHHNISTQTFNQFIQTSDHPSVPILLHHSHRFKNLGAQTGELWNTFLKTAAPLAPVKALMPVFTLSPVIINTAPCLFSDGSTSRAAYILWDKQILSQRSFPLPPPHKSAQRAELLGLLHGLSSARSWRCLNIFLDSKYLYHYLRTLALGTFQGRSSQAPFQALLPRLLSRKVVYLHHVRSHTNLPDPISRLNALTDALLITPVLQL

SEQ ID NO: 3168 - protein, 588 aa, synthetic construct
  source 1..588: note = Description of Artificial Sequence: Synthetic polypeptide
AVLGLEHLPRPPQISQFPLNPERLQALQHLVRKALEAGHIEPYTGPGNNPVFPVKKANGTWRFIHDLRATNSLTIDLSSSSPGPPDLSSPPTTLAHLQTIDLRDAFFQIPLPKQFQPYFAFTVPQQCNYGPGTRYAWKVLPQGFKNSPTLFQMQLAHILQPIRQAFPQCTILQYMDDILLASPSHEDLLLLSEATMASLISHGLPVSENKTQQTPGTIKFLGQIISPNHLTYDAVPTVPIRSRWALPELQALLGEIQWVSKGTPTLRQPLHSLYCALQPHTDPRDQIYLNPSQVQSLVQLRQALSQNCRSRLVQTLPLLGAIMLTLTGTTTVVFQSKEQWPLVWLHAPLPHTSQCPWGQLLASAVLLLDKYTLQSYGLLCQTIHHNISTQTFNQFIQTSDHPSVPILLHHSHRFKNLGAQTGELWNTFLKTAAPLAPVKALMPVFTLSPVIINTAPCLFSDGSTSRAAYILWDKQILSQRSFPLPPPHKSAQRAELLGLLHGLSSARSWRCLNIFLDSKYLYHYLRTLALGTFQGRSSQAPFQALLPRLLSRKVVYLHHVRSHTNLPDPISRLNALTDALLITPVLQL

SEQ ID NO: 3169 - protein, 588 aa, synthetic construct
  source 1..588: note = Description of Artificial Sequence: Synthetic polypeptide
AVLGLEHLPRPPEISQFPLNPERLQALQHLVRKALEAGHIEPYTGPGNNPVFPVKKANGTWRFIHDLRATNSLTIDLSSSSPGPPDLSSLPTTLAHLQTIDLKDAFFQIPLPKQFQPYFAFTVPQQCNYGPGTRYAWRVLPQGFKNSPTLFEMQLAHILQPIRQAFPQCTILQYMDDILLASPSHADLQLLSEATMASLISHGLPVSENKTQQTPGTIKFLGQIISPNHLTYDAVPKVPIRSRWALPELQALLGEIQWVSKGTPTLRQPLHSLYCALQRHTDPRDQIYLNPSQVQSLVQLRQALSQNCRSRLVQTLPLLGAIMLTLTGTTTVVFQSKQQWPLVWLHAPLPHTSQCPWGQLLASAVLLLDKYTLQSYGLLCQTIHHNISTQTFNQFIQTSDHPSVPILLHHSHRFKNLGAQTGELWNTFLKTTAPLAPVKALMPVFTLSPVIINTAPCLFSDGSTSQAAYILWDKHILSQRSFPLPPPHKSAQRAELLGLLHGLSSARSWRCLNIFLDSKYLYHYLRTLALGTFQGRSSQAPFQALLPRLLSRKVVYLHHVRSHTNLPDPISRLNALTDALLITPVLQL

SEQ ID NO: 3170 - protein, 588 aa, synthetic construct
  source 1..588: note = Description of Artificial Sequence: Synthetic polypeptide
AVLGLEHLPRPPEISQFPLNPERLQALQHLVRKALEAGHIEPYTGPGNNPVFPVKKANGTWRFIHDLRATNSLTIDLSSSSPGPPDLSSLPTTLAHLQTIDLKDAFFQIPLPKQFQPYFAFTVPQQCNYGPGTRYAWRVLPQGFKNSPTLFQMQLAHILQPIRQAFPQCTILQYMDDILLASPSHADLQLLSEATMASLISHGLPVSENKTQQTPGTIKFLGQIISPNHLTYDAVPKVPIRSRWALPELQALLGEIQWVSKGTPTLRQPLHSLYCALQPHTDPRDQIYLNPSQVQSLVQLRQALSQNCRSRLVQTLPLLGAIMLTLTGTTTVVFQSKQQWPLVWLHAPLPHTSQCPWGQLLASAVLLLDKYTLQSYGLLCQTIHHNISTQTFNQFIQTSDHPSVPILLHHSHRFKNLGAQTGELWNTFLKTTAPLAPVKALMPVFTLSPVIINTAPCLFSDGSTSQAAYILWDKHILSQRSFPLPPPHKSAQRAELLGLLHGLSSARSWRCLNIFLDSKYLYHYLRTLALGTFQGRSSQAPFQALLPRLLSRKVVYLHHVRSHTNLPDPISRLNALTDALLITPVLQL

SEQ ID NO: 3171 - protein, 588 aa, synthetic construct
  source 1..588: note = Description of Artificial Sequence: Synthetic polypeptide
AVLGLEHLPRPPEISQFPLNPERLQALQHLVRKALEAGHIEPYTGPGNNPVFPVKKANGTWRFIHDLRATNSLTIDLSSSSPGPPDLSSPPTTLAHLQTIDLKDAFFQIPLPKQFQPYFAFTVPQQCNYGPGTRYAWRVLPQGFKNSPTLFQMQLAHILQPIRQAFPQCTILQYMDDILLASPSHADLQLLSEATMASLISHGLPVSENKTQQTPGTIKFLGQIISPNHLTYDAVPKVPIRSRWALPELQALLGEIQWVSKGTPTLRQPLHSLYCALQPHTDPRDQIYLNPSQVQSLVQLRQALSQNCRSRLVQTLPLLGAIMLTLTGTTTVVFQSKQQWPLVWLHAPLPHTSQCPWGQLLASAVLLLDKYTLQSYGLLCQTIHHNISTQTFNQFIQTSDHPSVPILLHHSHRFKNLGAQTGELWNTFLKTTAPLAPVKALMPVFTLSPVIINTAPCLFSDGSTSQAAYILWDKHILSQRSFPLPPPHKSAQRAELLGLLHGLSSARSWRCLNIFLDSKYLYHYLRTLALGTFQGRSSQAPFQALLPRLLSRKVVYLHHVRSHTNLPDPISRLNALTDALLITPVLQL

SEQ ID NO: 3172 - protein, 583 aa, synthetic construct
  source 1..583: note = Description of Artificial Sequence: Synthetic polypeptide
GLEHLPRPPEISQFPLNPERLQALQHLVRKALEAGHIEPYTGPGNNPVFPVKKANGTWRFIHDLRATNSLTVDLSSSSPGPPDLSSLPTTLAHLQTIDLKDAFFQIPLPKQFQPYFAFTVPQQCNYGPGTRYAWKVLPQGFKNSPTLFEMQLASILQPIRQAFPQCVILQYMDDILLASPSPEDLQQLSEATMASLISHGLPVSQDKTQQTPGTIKFLGQIISPNHITYDAVPTVPIRSRWALPELQALLGEIQWVSKGTPTLRQPLHSLYCALQGHTDPRDQIYLNPSQVQSLMQLQQALSQNCRSRLAQTLPLLGAIMLTLTGTTTVVFQSKQQWPLVWLHAPLPHTSQCPWGQLLASAVLLLDKYTLQSYGLLCQTIHHNISIQTFNQFIQTSDHPSVPILLHHSHRFKNLGAQTGELWNTFLKTAAPLAPVKALTPVFTLSPIIINTAPCLFSDGSTSQAAYILWDKHILSQRSFPLPPPHKSAQQAELLGLLHGLSSARSWHCLNIFLDSKYLYHYLRTLALGTFQGKSSQAPFQALLPRLLAHKVIYLHHVRSHTNLPDPISKLNALTDALLITPIL

SEQ ID NO: 3173 - protein, 583 aa, synthetic construct
  source 1..583: note = Description of Artificial Sequence: Synthetic polypeptide
GLEHLPRPPEISQFPLNPERLQALQHLVRKALEAGHIEPYTGPGNNPVFPVKKANGTWRFIHDLRATNSLTVDLSSSSPGPPDLSSLPTTLAHLQTIDLKDAFFQIPLPKQFQPYFAFTVPQQCNYGPGTRYAWKVLPQGFKNSPTLFQMQLASILQPIRQAFPQCVILQYMDDILLASPSPEDLQQLSEATMASLISHGLPVSQDKTQQTPGTIKFLGQIISPNHITYDAVPTVPIRSRWALPELQALLGEIQWVSKGTPTLRQPLHSLYCALQGHTDPRDQIYLNPSQVQSLMQLQQALSQNCRSRLAQTLPLLGAIMLTLTGTTTVVFQSKQQWPLVWLHAPLPHTSQCPWGQLLASAVLLLDKYTLQSYGLLCQTIHHNISIQTFNQFIQTSDHPSVPILLHHSHRFKNLGAQTGELWNTFLKTAAPLAPVKALTPVFTLSPIIINTAPCLFSDGSTSQAAYILWDKHILSQRSFPLPPPHKSAQQAELLGLLHGLSSARSWHCLNIFLDSKYLYHYLRTLAWGTFQGKSSQAPFQALLPRLLAHKVIYLHHVRSHTNLPDPISKLNALTDALLITPIL

SEQ ID NO: 3174 - protein, 583 aa, synthetic construct
  source 1..583: note = Description of Artificial Sequence: Synthetic polypeptide
GLEHLPRPPEISQFPLNPERLQALQHLVRKALEAGHIEPYTGPGNNPVFPVKKANGTWRFIHDLRATNSLTVDLSSSSPGPPDLSSPPTTLAHLQTIDLKDAFFQIPLPKQFQPYFAFTVPQQCNYGPGTRYAWKVLPQGFKNSPTLFQMQLASILQPIRQAFPQCVILQYMDDILLASPSPEDLQQLSEATMASLISHGLPVSQDKTQQTPGTIKFLGQIISPNHITYDAVPTVPIRSRWALPELQALLGEIQWVSKGTPTLRQPLHSLYCALQGHTDPRDQIYLNPSQVQSLMQLQQALSQNCRSRLAQTLPLLGAIMLTLTGTTTVVFQSKQQWPLVWLHAPLPHTSQCPWGQLLASAVLLLDKYTLQSYGLLCQTIHHNISIQTFNQFIQTSDHPSVPILLHHSHRFKNLGAQTGELWNTFLKTAAPLAPVKALTPVFTLSPIIINTAPCLFSDGSTSQAAYILWDKHILSQRSFPLPPPHKSAQQAELLGLLHGLSSARSWHCLNIFLDSKYLYHYLRTLAWGTFQGKSSQAPFQALLPRLLAHKVIYLHHVRSHTNLPDPISKLNALTDALLITPIL

SEQ ID NO: 3175 - protein, 584 aa, synthetic construct
  source 1..584: note = Description of Artificial Sequence: Synthetic polypeptide
GLEHLPPPPEVSQFPLNPERLQALTDLVSRALEAKHIEPYQGPGNNPIFPVKKPNGKWRFIHDLRATNSVTRDLASPSPGPPDLTSLPQGLPHLRTIDLTDAFFQIPLPTIFQPYFAFTLPQPNNYGPGTRYSWRVLPQGFKNSPTLFEQQLSHILTPVRKTFPNSLIIQYMDDILLASPAPGELAALTDKVTNALTKEGLPLSPEKTQATPGPIHFLGQVISQDCITYETLPSINVKSTWSLAELQSMLGELQWVSKGTPVLRSSLHQLYLALRGHRDPRDTIKLTSIQVQALRTIQKALTLNCRSRLVNQLPILALIMLRPTGTTAVLFQTKQKWPLVWLHTPHPATSLRPWGQLLANAVIILDKYSLQHYGQVCKSFHHNISNQALTYYLHTSDQSSVAILLQHSHRFHNLGAQPSGPWRSLLQMPQIFQNIDVLRPPFTISPVVINHAPCLFSDGSASKAAFIIWDRQVIHQQVLSLPSTCSAQAGELFGLLAGLQKSQPWVALNIFLDSKFLIGHLRRMALGAFPGPSTQCELHTQLLPLLQGKTVYVHHVRSHTLLQDPISRLNEATDALMLAPLLPL

SEQ ID NO: 3176 - protein, 584 aa, synthetic construct
  source 1..584: note = Description of Artificial Sequence: Synthetic polypeptide
GLEHLPPPPEVSQFPLNPERLQALTDLVSRALEAKHIEPYQGPGNNPIFPVKKPNGKWRFIHDLRATNSVTRDLASPSPGPPDLTSLPQGLPHLRTIDLTDAFFQIPLPTIFQPYFAFTLPQPNNYGPGTRYSWRVLPQGFKNSPTLFQQQLSHILTPVRKTFPNSLIIQYMDDILLASPAPGELAALTDKVTNALTKEGLPLSPEKTQATPGPIHFLGQVISQDCITYETLPSINVKSTWSLAELQSMLGELQWVSKGTPVLRSSLHQLYLALRGHRDPRDTIKLTSIQVQALRTIQKALTLNCRSRLVNQLPILALIMLRPTGTTAVLFQTKQKWPLVWLHTPHPATSLRPWGQLLANAVIILDKYSLQHYGQVCKSFHHNISNQALTYYLHTSDQSSVAILLQHSHRFHNLGAQPSGPWRSLLQMPQIFQNIDVLRPPFTISPVVINHAPCLFSDGSASKAAFIIWDRQVIHQQVLSLPSTCSAQAGELFGLLAGLQKSQPWVALNIFLDSKFLIGHLRRMAWGAFPGPSTQCELHTQLLPLLQGKTVYVHHVRSHTLLQDPISRLNEATDALMLAPLLPL

SEQ ID NO: 3177 - protein, 584 aa, synthetic construct
  source 1..584: note = Description of Artificial Sequence: Synthetic polypeptide
GLEHLPPPPEVSQFPLNPERLQALTDLVSRALEAKHIEPYQGPGNNPIFPVKKPNGKWRFIHDLRATNSVTRDLASPSPGPPDLTSPPQGLPHLRTIDLTDAFFQIPLPTIFQPYFAFTLPQPNNYGPGTRYSWRVLPQGFKNSPTLFQQQLSHILTPVRKTFPNSLIIQYMDDILLASPAPGELAALTDKVTNALTKEGLPLSPEKTQATPGPIHFLGQVISQDCITYETLPSINVKSTWSLAELQSMLGELQWVSKGTPVLRSSLHQLYLALRGHRDPRDTIKLTSIQVQALRTIQKALTLNCRSRLVNQLPILALIMLRPTGTTAVLFQTKQKWPLVWLHTPHPATSLRPWGQLLANAVIILDKYSLQHYGQVCKSFHHNISNQALTYYLHTSDQSSVAILLQHSHRFHNLGAQPSGPWRSLLQMPQIFQNIDVLRPPFTISPVVINHAPCLFSDGSASKAAFIIWDRQVIHQQVLSLPSTCSAQAGELFGLLAGLQKSQPWVALNIFLDSKFLIGHLRRMAWGAFPGPSTQCELHTQLLPLLQGKTVYVHHVRSHTLLQDPISRLNEATDALMLAPLLPL

SEQ ID NO: 3178 - protein, 584 aa, synthetic construct
  source 1..584: note = Description of Artificial Sequence: Synthetic polypeptide
GLEHLPPPPEVSQFPLNPERLQALTDLVSRALEAKHIEPYQGPGNNPIFPVKKPNGKWRFIHDLRATNSLTRDLASPSPGPPDLTSLPQDLPHLRTIDLTDAFFQIPLPAVFQPYFAFTLPQPNNHGPGTRYSWRVLPQGFKNSPTLFEQQLSHILAPVRKAFPNSLIIQYMDDILLASPALRELTALTDKVTNALTKEGLPMSLEKTQATPGSIHFLGQVISPDCITYETLPSIHVKSIWSLAELQSMLGELQWVSKGTPVLRSSLHQLYLALRGHRDPRDTIELTSTQVQALKTIQKALALNCRSRLVSQLPILALIILRPTGTTAVLFQTKQKWPLVWLHTPHPATSLRPWGQLLANAIITLDKYSLQHYGQICKSFHHNISNQALTYYLHTSDQSSVAILLQHSHRFHNLGAQPSGPWRSLLQVPQIFQNIDVLRPPFIISPVVIDHAPCLFSDGATSKAAFILWDKQVIHQQVLPLPSTCSAQAGELFGLLAGLQKSKPWPALNIFLDSKFLIGHLRRMALGAFLGPSTQCDLHARLFPLLQGKTVYVHHVRSHTLLQDPISRLNEATDALMLAPLLPL

SEQ ID NO: 3179 - protein, 584 aa, synthetic construct
  source 1..584: note = Description of Artificial Sequence: Synthetic polypeptide
GLEHLPPPPEVSQFPLNPERLQALTDLVSRALEAKHIEPYQGPGNNPIFPVKKPNGKWRFIHDLRATNSLTRDLASPSPGPPDLTSLPQDLPHLRTIDLTDAFFQIPLPAVFQPYFAFTLPQPNNHGPGTRYSWRVLPQGFKNSPTLFQQQLSHILAPVRKAFPNSLIIQYMDDILLASPALRELTALTDKVTNALTKEGLPMSLEKTQATPGSIHFLGQVISPDCITYETLPSIHVKSIWSLAELQSMLGELQWVSKGTPVLRSSLHQLYLALRGHRDPRDTIELTSTQVQALKTIQKALALNCRSRLVSQLPILALIILRPTGTTAVLFQTKQKWPLVWLHTPHPATSLRPWGQLLANAIITLDKYSLQHYGQICKSFHHNISNQALTYYLHTSDQSSVAILLQHSHRFHNLGAQPSGPWRSLLQVPQIFQNIDVLRPPFIISPVVIDHAPCLFSDGATSKAAFILWDKQVIHQQVLPLPSTCSAQAGELFGLLAGLQKSKPWPALNIFLDSKFLIGHLRRMAWGAFLGPSTQCDLHARLFPLLQGKTVYVHHVRSHTLLQDPISRLNEATDALMLAPLLPL

SEQ ID NO: 3180 - protein, 584 aa, synthetic construct
  source 1..584: note = Description of Artificial Sequence: Synthetic polypeptide
GLEHLPPPPEVSQFPLNPERLQALTDLVSRALEAKHIEPYQGPGNNPIFPVKKPNGKWRFIHDLRATNSLTRDLASPSPGPPDLTSPPQDLPHLRTIDLTDAFFQIPLPAVFQPYFAFTLPQPNNHGPGTRYSWRVLPQGFKNSPTLFQQQLSHILAPVRKAFPNSLIIQYMDDILLASPALRELTALTDKVTNALTKEGLPMSLEKTQATPGSIHFLGQVISPDCITYETLPSIHVKSIWSLAELQSMLGELQWVSKGTPVLRSSLHQLYLALRGHRDPRDTIELTSTQVQALKTIQKALALNCRSRLVSQLPILALIILRPTGTTAVLFQTKQKWPLVWLHTPHPATSLRPWGQLLANAIITLDKYSLQHYGQICKSFHHNISNQALTYYLHTSDQSSVAILLQHSHRFHNLGAQPSGPWRSLLQVPQIFQNIDVLRPPFIISPVVIDHAPCLFSDGATSKAAFILWDKQVIHQQVLPLPSTCSAQAGELFGLLAGLQKSKPWPALNIFLDSKFLIGHLRRMAWGAFLGPSTQCDLHARLFPLLQGKTVYVHHVRSHTLLQDPISRLNEATDALMLAPLLPL

SEQ ID NO: 3181 - protein, 584 aa, synthetic construct
  source 1..584: note = Description of Artificial Sequence: Synthetic polypeptide
HLPPPPQVDQFPLNLPERLQALNDLVSKALEAGHIEPYSGPGNNPVFPVKKPNGKWRFIHDLRATNAITTTLTSPSPGPPDLTSLPTALPHLQTIDLTDAFFQIPLPKQYQPYFAFTIPQPCNYGPGTRYAWTVLPQGFKNSPTLFEQQLAAVLNPMRKMFPTSTIVQYMDDILLASPTNEELQQLSQLTLQALTTHGLPISQEKTQQTPGQIRFLGQVISPNHITYESTPTIPIKSQWTLTELQVILGEIQWVSKGTPILRKHLQSLYSALHGYRDPRACITLTPQQLHALHAIQQALQHNCRGRLNPALPLLGLISLSTSGTTSVIFQPKQNWPLAWLHTPHPPTSLCPWGHLLACTILTLDKYTLQHYGQLCQSFHHNMSKQALCDFLRNSPHPSVGILIHHMGRFHNLGSQPSGPWKTLLHLPTLLQEPRLLRPIFTLSPVVLDTAPCLFSDGSPQKAAYVLWDQTILQQDITPLPSHETHSAQKGELLALICGLRAAKPWPSLNIFLDSKYLIKYLHSLAIGAFLGTSAHQTLQAALPPLLQGKTIYLHHVRSHTNLPDPISTFNEYTDSLILAPLVPL

SEQ ID NO: 3182 - protein, 584 aa, synthetic construct
  source 1..584: note = Description of Artificial Sequence: Synthetic polypeptide
HLPPPPQVDQFPLNLPERLQALNDLVSKALEAGHIEPYSGPGNNPVFPVKKPNGKWRFIHDLRATNAITTTLTSPSPGPPDLTSLPTALPHLQTIDLTDAFFQIPLPKQYQPYFAFTIPQPCNYGPGTRYAWTVLPQGFKNSPTLFQQQLAAVLNPMRKMFPTSTIVQYMDDILLASPTNEELQQLSQLTLQALTTHGLPISQEKTQQTPGQIRFLGQVISPNHITYESTPTIPIKSQWTLTELQVILGEIQWVSKGTPILRKHLQSLYSALHPYRDPRACITLTPQQLHALHAIQQALQHNCRGRLNPALPLLGLISLSTSGTTSVIFQPKQNWPLAWLHTPHPPTSLCPWGHLLACTILTLDKYTLQHYGQLCQSFHHNMSKQALCDFLRNSPHPSVGILIHHMGRFHNLGSQPSGPWKTLLHLPTLLQEPRLLRPIFTLSPVVLDTAPCLFSDGSPQKAAYVLWDQTILQQDITPLPSHETHSAQKGELLALICGLRAAKPWPSLNIFLDSKYLIKYLHSLAIGAFLGTSAHQTLQAALPPLLQGKTIYLHHVRSHTNLPDPISTFNEYTDSLILAPLVPL

SEQ ID NO: 3183 - protein, 584 aa, synthetic construct
  source 1..584: note = Description of Artificial Sequence: Synthetic polypeptide
HLPPPPQVDQFPLNLPERLQALNDLVSKALEAGHIEPYSGPGNNPVFPVKKPNGKWRFIHDLRATNAITTTLTSPSPGPPDLTSPPTALPHLQTIDLTDAFFQIPLPKQYQPYFAFTIPQPCNYGPGTRYAWTVLPQGFKNSPTLFQQQLAAVLNPMRKMFPTSTIVQYMDDILLASPTNEELQQLSQLTLQALTTHGLPISQEKTQQTPGQIRFLGQVISPNHITYESTPTIPIKSQWTLTELQVILGEIQWVSKGTPILRKHLQSLYSALHPYRDPRACITLTPQQLHALHAIQQALQHNCRGRLNPALPLLGLISLSTSGTTSVIFQPKQNWPLAWLHTPHPPTSLCPWGHLLACTILTLDKYTLQHYGQLCQSFHHNMSKQALCDFLRNSPHPSVGILIHHMGRFHNLGSQPSGPWKTLLHLPTLLQEPRLLRPIFTLSPVVLDTAPCLFSDGSPQKAAYVLWDQTILQQDITPLPSHETHSAQKGELLALICGLRAAKPWPSLNIFLDSKYLIKYLHSLAIGAFLGTSAHQTLQAALPPLLQGKTIYLHHVRSHTNLPDPISTFNEYTDSLILAPLVPL

SEQ ID NO: 3184 - protein, 581 aa, synthetic construct
  source 1..581: note = Description of Artificial Sequence: Synthetic polypeptide
PLGTSDSPVTHADPIDWKSEEPVWVDQWPLTQEKLSAAQQLVQEQLRLGHIEPSTSAWNSPIFVIKKKSGKWRLLQDLRKVNETMMHMGALQPGLPTPSAIPDKSYIIVIDLKDCFYTIPLAPQDCKRFAFSLPSVNFKEPMQRYQWRVLPQGMTNSPTLCQKFVATAIAPVRQRFPQLYLVHYMDDILLAHTDEHLLYQAFSILKQHLSLNGLVIADEKIQTHFPYNYLGFSLYPRVYNTQLVKLQTDHLKTLNDFQKLLGDINWIRPYLKLPTYTLQPLFDILKGDSDPASPRTLSLEGRTALQSIEEAIRQQQITYCDYQRSWGLYILPTPRAPTGVLYQDKPLRWIYLSATPTKHLLPYYELVAKIIAKGRHEAIQYFGMEPPFICVPYALEQQDWLFQFSDNWSIAFANYPGQITHHYPSDKLLQFASSHAFIFPKIVRRQPIPEATLIFTDGSSNGTAALIINHQTYYAQTSFSSAQVVELFAVHQALLTVPTSFNLFTDSSYVVGALQMIETVPIIGTTSPEVLNLFTLIQQVLHCRQHPCFFGHIRAHSTLPGALVQGNHTADVLTKQVFFQS

SEQ ID NO: 3185 - protein, 581 aa, synthetic construct
  source 1..581: note = Description of Artificial Sequence: Synthetic polypeptide
PLGTSDSPVTHADPIDWKSEEPVWVDQWPLTQEKLSAAQQLVQEQLRLGHIEPSTSAWNSPIFVIKKKSGKWRLLQDLRKVNETMMHMGALQPGLPTPSPIPDKSYIIVIDLKDCFYTIPLAPQDCKRFAFSLPSVNFKEPMQRYQWRVLPQGMTNSPTLCQKFVATAIAPVRQRFPQLYLVHYMDDILLAHTDEHLLYQAFSILKQHLSLNGLVIADEKIQTHFPYNYLGFSLYPRVYNTQLVKLQTDHLKTLNDFQKLLGDINWIRPYLKLPTYTLQPLFDILKGDSDPASPRTLSLEGRTALQSIEEAIRQQQITYCDYQRSWGLYILPTPRAPTGVLYQDKPLRWIYLSATPTKHLLPYYELVAKIIAKGRHEAIQYFGMEPPFICVPYALEQQDWLFQFSDNWSIAFANYPGQITHHYPSDKLLQFASSHAFIFPKIVRRQPIPEATLIFTDGSSNGTAALIINHQTYYAQTSFSSAQVVELFAVHQALLTVPTSFNLFTDSSYVVGALQMIETVPIIGTTSPEVLNLFTLIQQVLHCRQHPCFFGHIRAHSTLPGALVQGNHTADVLTKQVFFQS

SEQ ID NO: 3186 - protein, 793 aa, synthetic construct
  source 1..793: note = Description of Artificial Sequence: Synthetic polypeptide
TLGDQGSRGSDPLPEPRVTLTVEGIPTEFLVNTGAEHSVLTKPMGKMGSKRTVVAGATGSKVYPWTTKRLLKIGQKQVTHSFLVIPECPAPLLGRDLLTKLKAQIQFSTEGPQVTWEDRPAMCLVLNLEEEYRLHEKPVPPSIDPSWLQLFPMVWAEKAGMGLANQVPPVVVELKSDASPVAVRQYPMSKEAREGIRPHIQRFLDLGILVPCQSPWNTPLLPVKKPGTNDYRPVQDLREVNKRVQDIHPTVPNPYNLLSSLPPSHTWYSVLDLKDAFFCLKLHPNSQPLFAFEWRDPEKGNTGQLTWTRLPQGFKNSPTLFDEALHRDLASFRALNPQVVMLQYVDDLLVAAPTYRDCKEGTRRLLQELSKLGYRVSAKKAQLCREEVTYLGYLLKGGKRWLTPARKATVMKIPTPTTPRQVREFLGTAGFCRLWIPGFASLAAPLYPLTREKVPFTWTEAHQEAFGRIKEALLSAPALALPDLTKPFALYVDEKEGVARGVLTQTLGPWRRPVAYLSKKLDPVASGWPTCLKAIAAVALLLKDADKLTLGQNVLVIAPHNLESIVRQPPDRWMTNARMTHYQSLLLNERVSFAPPAILNPATLLPVESDDTPIHICSEILAEETGTRPDLRDQPLPGVPAWYTDGSSFIMDGRRQAGAAIVDNKRTVWASNLPEGTSAQKAELIALTQALRLAEGKSINIYTDSRYAFATAHVHGAIYKQRGLLTSAGKDIKNKEEILALLEAIHLPKRVAIIHCPGHQRGTDPVATGNRKADEAAKQAAQSTRILTETTKN

SEQ ID NO: 3187 - protein, 702 aa, synthetic construct
  source 1..702: note = Description of Artificial Sequence: Synthetic polypeptide
LLGRDLLTKLKAQIQFSTEGPQVTWEDRPAMCLVLNLEEEYRLHEKPVPPSIDPSWLQLFPMVWAEKAGMGLANQVPPVVVELKSDASPVAVRQYPMSKEAREGIRPHIQRFLDLGILVPCQSPWNTPLLPVKKPGTNDYRPVQDLREVNKRVQDIHPTVPNPYNLLSSLPPSHTWYSVLDLKDAFFCLKLHPNSQPLFAFEWRDPEKGNTGQLTWTRLPQGFKNSPTLFDEALHRDLASFRALNPQVVMLQYVDDLLVAAPTYRDCKEGTRRLLQELSKLGYRVSAKKAQLCREEVTYLGYLLKGGKRWLTPARKATVMKIPTPTTPRQVREFLGTAGFCRLWIPGFASLAAPLYPLTREKVPFTWTEAHQEAFGRIKEALLSAPALALPDLTKPFALYVDEKEGVARGVLTQTLGPWRRPVAYLSKKLDPVASGWPTCLKAIAAVALLLKDADKLTLGQNVLVIAPHNLESIVRQPPDRWMTNARMTHYQSLLLNERVSFAPPAILNPATLLPVESDDTPIHICSEILAEETGTRPDLRDQPLPGVPAWYTDGSSFIMDGRRQAGAAIVDNKRTVWASNLPEGTSAQKAELIALTQALRLAEGKSINIYTDSRYAFATAHVHGAIYKQRGLLTSAGKDIKNKEEILALLEAIHLPKRVAIIHCPGHQRGTDPVATGNRKADEAAKQAAQSTRILTETTKN

SEQ ID NO: 3188 - protein, 702 aa, synthetic construct
  source 1..702: note = Description of Artificial Sequence: Synthetic polypeptide
LLGRDLLTKLKAQIQFSTEGPQVTWEDRPAMCLVLNLEEEYRLHEKPVPPSIDPSWLQLFPMVWAEKAGMGLANQVPPVVVELKSDASPVAVRQYPMSKEAREGIRPHIQRFLDLGILVPCQSPWNTPLLPVKKPGTNDYRPVQDLREVNKRVQDIHPTVPNPYNLLSSLPPSHTWYSVLDLKDAFFCLKLHPNSQPLFAFEWRDPEKGNTGQLTWTRLPQGFKNSPTLFNEALHRDLASFRALNPQVVMLQYVDDLLVAAPTYRDCKEGTRRLLQELSKLGYRVSAKKAQLCREEVTYLGYLLKGGKRWLTPARKATVMKIPTPTTPRQVREFLGTAGFCRLWIPGFASLAAPLYPLTRPKVPFTWTEAHQEAFGRIKEALLSAPALALPDLTKPFALYVDEKEGVARGVLTQTLGPWRRPVAYLSKKLDPVASGWPTCLKAIAAVALLLKDADKLTLGQNVLVIAPHNLESIVRQPPDRWMTNARMTHYQSLLLNERVSFAPPAILNPATLLPVESDDTPIHICSEILAEETGTRPDLRDQPLPGVPAWYTDGSSFIMDGRRQAGAAIVDNKRTVWASNLPEGTSAQKAELIALTQALRLAEGKSINIYTDSRYAFATAHVHGAIYKQRGWLTSAGKDIKNKEEILALLEAIHLPKRVAIIHCPGHQRGTDPVATGNRKADEAAKQAAQSTRILTETTKN

SEQ ID NO: 3189 - protein, 702 aa, synthetic construct
  source 1..702: note = Description of Artificial Sequence: Synthetic polypeptide
LLGRDLLTKLKAQIQFSTEGPQVTWEDRPAMCLVLNLEEEYRLHEKPVPPSIDPSWLQLFPMVWAEKAGMGLANQVPPVVVELKSDASPVAVRQYPMSKEAREGIRPHIQRFLDLGILVPCQSPWNTPLLPVKKPGTNDYRPVQDLREVNKRVQDIHPTVPNPYNLLSSLPPSHTWYSVLDLKDAFFCLKLHPNSQPLFAFEWRDPEKGNTGQLTWTRLPQGFKNSPTLFNEALHRDLASFRALNPQVVMLQYVDDLLVAAPTYRDCKEGTRRLLQELSKLGYRVSAKKAQLCREEVTYLGYLLKGGKRWLTPARKATVMKIPTPTTPRQVREFLGKAGFCRLFIPGFASLAAPLYPLTRPKVPFTWTEAHQEAFGRIKEALLSAPALALPDLTKPFALYVDEKEGVARGVLTQTLGPWRRPVAYLSKKLDPVASGWPTCLKAIAAVALLLKDADKLTLGQNVLVIAPHNLESIVRQPPDRWMTNARMTHYQSLLLNERVSFAPPAILNPATLLPVESDDTPIHICSEILAEETGTRPDLRDQPLPGVPAWYTDGSSFIMDGRRQAGAAIVDNKRTVWASNLPEGTSAQKAELIALTQALRLAEGKSINIYTDSRYAFATAHVHGAIYKQRGWLTSAGKDIKNKEEILALLEAIHLPKRVAIIHCPGHQRGTDPVATGNRKADEAAKQAAQSTRILTETTKN

SEQ ID NO: 3190 - protein, 793 aa, synthetic construct
  source 1..793: note = Description of Artificial Sequence: Synthetic polypeptide
TLGDQGSRGSDPLPEPRVTLTVEGIPTEFLVNTGAEHSVLTKPMGKMGSKRTVVAGATGSKVYPWTTKRLLKIGQKQVTHSFLVIPECPAPLLGRDLLTKLKAQIQFSTEGPQVTWEDRPAMCLVLNLEEEYRLHEKPVPPSIDPSWLQLFPMVWAEKAGMGLANQVPPVVVELKSDASPVAVRQYPMSKEAREGIRPHIQRFLDLGILVPCQSPWNTPLLPVKKPGTNDYRPVQDLREVNKRVQDIHPTVPNPYNLLSSLPPSHTWYSVLDLKDAFFCLKLHPNSQPLFAFEWRDPEKGNTGQLTWTRLPQGFKNSPTLFNEALHRDLASFRALNPQVVMLQYVDDLLVAAPTYRDCKEGTRRLLQELSKLGYRVSAKKAQLCREEVTYLGYLLKGGKRWLTPARKATVMKIPTPTTPRQVREFLGTAGFCRLWIPGFASLAAPLYPLTRPKVPFTWTEAHQEAFGRIKEALLSAPALALPDLTKPFALYVDEKEGVARGVLTQTLGPWRRPVAYLSKKLDPVASGWPTCLKAIAAVALLLKDADKLTLGQNVLVIAPHNLESIVRQPPDRWMTNARMTHYQSLLLNERVSFAPPAILNPATLLPVESDDTPIHICSEILAEETGTRPDLRDQPLPGVPAWYTDGSSFIMDGRRQAGAAIVDNKRTVWASNLPEGTSAQKAELIALTQALRLAEGKSINIYTDSRYAFATAHVHGAIYKQRGWLTSAGKDIKNKEEILALLEAIHLPKRVAIIHCPGHQRGTDPVATGNRKADEAAKQAAQSTRILTETTKN

SEQ ID NO: 3191 - protein, 793 aa, synthetic construct
  source 1..793: note = Description of Artificial Sequence: Synthetic polypeptide
TLGDQGSRGSDPLPEPRVTLTVEGIPTEFLVNTGAEHSVLTKPMGKMGSKRTVVAGATGSKVYPWTTKRLLKIGQKQVTHSFLVIPECPAPLLGRDLLTKLKAQIQFSTEGPQVTWEDRPAMCLVLNLEEEYRLHEKPVPPSIDPSWLQLFPMVWAEKAGMGLANQVPPVVVELKSDASPVAVRQYPMSKEAREGIRPHIQRFLDLGILVPCQSPWNTPLLPVKKPGTNDYRPVQDLREVNKRVQDIHPTVPNPYNLLSSLPPSHTWYSVLDLKDAFFCLKLHPNSQPLFAFEWRDPEKGNTGQLTWTRLPQGFKNSPTLFNEALHRDLASFRALNPQVVMLQYVDDLLVAAPTYRDCKEGTRRLLQELSKLGYRVSAKKAQLCREEVTYLGYLLKGGKRWLTPARKATVMKIPTPTTPRQVREFLGKAGFCRLFIPGFASLAAPLYPLTRPKVPFTWTEAHQEAFGRIKEALLSAPALALPDLTKPFALYVDEKEGVARGVLTQTLGPWRRPVAYLSKKLDPVASGWPTCLKAIAAVALLLKDADKLTLGQNVLVIAPHNLESIVRQPPDRWMTNARMTHYQSLLLNERVSFAPPAILNPATLLPVESDDTPIHICSEILAEETGTRPDLRDQPLPGVPAWYTDGSSFIMDGRRQAGAAIVDNKRTVWASNLPEGTSAQKAELIALTQALRLAEGKSINIYTDSRYAFATAHVHGAIYKQRGWLTSAGKDIKNKEEILALLEAIHLPKRVAIIHCPGHQRGTDPVATGNRKADEAAKQAAQSTRILTETTKN

SEQ ID NO: 3192 - protein, 671 aa, synthetic construct
  source 1..671: note = Description of Artificial Sequence: Synthetic polypeptide
TLNLEDEYRLYETSAEPEVSPGSTWLSDFPQAWAETGGMGLAVRQAPLIIPLKATSTPVSIKQYPMSQEAKLGIKPHIQRLLDQGILVPCQSPWNTPLLPVKKPGTNDYRPVQDLREVNKRVEDIHPTVPNPYNLLSGLPPSHRWYTVLDLKDAFFCLRLHPTSQPLFAFEWRDPGMGISGQLTWTRLPQGFKNSPTLFDEALHRDLADFRIQHPDLILLQYVDDILLAATSELDCQQGTRALLLTLGNLGYRASAKKAQLCQKQVKYLGYLLKEGQRWLTEARKETVMGQPTPKTPRQLREFLGTAGFCRLWIPGFAEMAAPLYPLTKTGTLFNWGPDQQKAYQEIKQALLTAPALGLPDLTKPFELFVDEKQGYAKGVLTQKLGPWRRPVAYLSKKLDPVAAGWPPCLRMVAAIAVLRKDAGKLTMGQPLVILAPHAVEALVKQPPDRWLSNARMTHYQAMLLDTDRVQFGPVVALNPATLLPLPEEGAPHDCLEILAETHGTRPDLTDQPIPDADHTWYTDGSSFLQEGQRKAGAAVTTETEVIWARALPAGTSAQRAELIALTQALKMAEGKRLNVYTDSRYAFATAHIHGEIYRRRGLLTSEGREIKNKSEILALLKALFLPKRLSIIHCLGHQKGDSAEARGNRLADQAAREAAIKTPPDTSTLL

SEQ ID NO: 3193 - protein, 671 aa, synthetic construct
  source 1..671: note = Description of Artificial Sequence: Synthetic polypeptide
TLNLEDEYRLYETSAEPEVSPGSTWLSDFPQAWAETGGMGLAVRQAPLIIPLKATSTPVSIKQYPMSQEAKLGIKPHIQRLLDQGILVPCQSPWNTPLLPVKKPGTNDYRPVQDLREVNKRVEDIHPTVPNPYNLLSGLPPSHRWYTVLDLKDAFFCLRLHPTSQPLFAFEWRDPGMGISGQLTWTRLPQGFKNSPTLFNEALHRDLADFRIQHPDLILLQYVDDILLAATSELDCQQGTRALLLTLGNLGYRASAKKAQLCQKQVKYLGYLLKEGQRWLTEARKETVMGQPTPKTPRQLREFLGTAGFCRLWIPGFAEMAAPLYPLTKPGTLFNWGPDQQKAYQEIKQALLTAPALGLPDLTKPFELFVDEKQGYAKGVLTQKLGPWRRPVAYLSKKLDPVAAGWPPCLRMVAAIAVLRKDAGKLTMGQPLVILAPHAVEALVKQPPDRWLSNARMTHYQAMLLDTDRVQFGPVVALNPATLLPLPEEGAPHDCLEILAETHGTRPDLTDQPIPDADHTWYTDGSSFLQEGQRKAGAAVTTETEVIWARALPAGTSAQRAELIALTQALKMAEGKRLNVYTDSRYAFATAHIHGEIYRRRGWLTSEGREIKNKSEILALLKALFLPKRLSIIHCLGHQKGDSAEARGNRLADQAAREAAIKTPPDTSTLL

SEQ ID NO: 3194 - protein, 671 aa, synthetic construct
  source 1..671: note = Description of Artificial Sequence: Synthetic polypeptide
TLNLEDEYRLYETSAEPEVSPGSTWLSDFPQAWAETGGMGLAVRQAPLIIPLKATSTPVSIKQYPMSQEAKLGIKPHIQRLLDQGILVPCQSPWNTPLLPVKKPGTNDYRPVQDLREVNKRVEDIHPTVPNPYNLLSGLPPSHRWYTVLDLKDAFFCLRLHPTSQPLFAFEWRDPGMGISGQLTWTRLPQGFKNSPTLFNEALHRDLADFRIQHPDLILLQYVDDILLAATSELDCQQGTRALLLTLGNLGYRASAKKAQLCQKQVKYLGYLLKEGQRWLTEARKETVMGQPTPKTPRQLREFLGKAGFCRLFIPGFAEMAAPLYPLTKPGTLFNWGPDQQKAYQEIKQALLTAPALGLPDLTKPFELFVDEKQGYAKGVLTQKLGPWRRPVAYLSKKLDPVAAGWPPCLRMVAAIAVLRKDAGKLTMGQPLVILAPHAVEALVKQPPDRWLSNARMTHYQAMLLDTDRVQFGPVVALNPATLLPLPEEGAPHDCLEILAETHGTRPDLTDQPIPDADHTWYTDGSSFLQEGQRKAGAAVTTETEVIWARALPAGTSAQRAELIALTQALKMAEGKRLNVYTDSRYAFATAHIHGEIYRRRGWLTSEGREIKNKSEILALLKALFLPKRLSIIHCLGHQKGDSAEARGNRLADQAAREAAIKTPPDTSTLL

SEQ ID NO: 3195 - protein, 671 aa, synthetic construct
  source 1..671: note = Description of Artificial Sequence: Synthetic polypeptide
LGIEDEYRLHETSTEPDVSLGSTWLSDFPQAWAETGGMGLAVRQAPLIIPLKATSTPVSIQQYPMSHEARLGIKPHIQRLLDQGILVPCQSPWNTPLLPVKKPGTNDYRPVQDLREVNKRVEDIHPTVPNPYNLLSGLPPSHQWYTVLDLKDAFFCLRLHPTSQPLFAFEWRDPGMGISGQLTWTRLPQGFKNSPTLFNEALHRDLADFRIQHPDLILLQYVDDILLAATSELDCQQGTRALLQTLGDLGYRASAKKAQICQKQVKYLGYLLREGQRWLTEARKETVMGQPVPKTPRQLREFLGKAGFCRLFIPGFAEMAAPLYPLTKPGTLFSWGPDQQKAYQEIKQALLTAPALGLPDLTKPFELFVDEKQGYAKGVLTQKLGPWRRPVAYLSKKLDPVAAGWPPCLRMVAAIAVLTKDAGKLTMGQPLVILAPHAVEALVKQPPDRWLSNARMTHYQAMLLDTDRVQFGPVVALNPATLLPLPEEGAPHDCLEILAETHGTRPDLTDQPIPDADHTWYTDGSSFLQEGQRKAGAAVTTETEVIWAGALPAGTSAQRAELIALTQALKMAEGKRLNVYTDSRYAFATAHIHGEIYRRRGWLTSEGREIKNKSEILALLKALFLPKRLSIIHCLGHQKGDSAEARGNRLADQAAREAAIKTPPDTSTLLI

SEQ ID NO: 3196 - protein, 671 aa, synthetic construct
  source 1..671: note = Description of Artificial Sequence: Synthetic polypeptide
TLGIEDEYRLHETSTEPDVSLGSTWLSDFPQAWAETGGMGLAVRQAPLIIPLKATSTPVSIQQYPMSHEARLGIKPHIQRLLDQGILVPCQSPWNTPLLPVKKPGTNDYRPVQDLREVNKRVEDIHPTVPNPYNLLSGLPPSHQWYTVLDLKDAFFCLRLHPTSQPLFAFEWRDPGMGISGQLTWTRLPQGFKNSPTLFDEALHRDLADFRIQHPDLILLQYVDDILLAATSELDCQQGTRALLQTLGDLGYRASAKKAQICQKQVKYLGYLLREGQRWLTEARKETVMGQPVPKTPRQLREFLGTAGFCRLWIPGFAEMAAPLYPLTKTGTLFSWGPDQQKAYQEIKQALLTAPALGLPDLTKPFELFVDEKQGYAKGVLTQKLGPWRRPVAYLSKKLDPVAAGWPPCLRMVAAIAVLTKDAGKLTMGQPLVILAPHAVEALVKQPPDRWLSNARMTHYQAMLLDTDRVQFGPVVALNPATLLPLPEEGAPHDCLEILAETHGTRPDLTDQPIPDADHTWYTDGSSFLQEGQRKAGAAVTTETEVIWAGALPAGTSAQRAELIALTQALKMAEGKRLNVYTDSRYAFATAHIHGEIYRRRGLLTSEGREIKNKSEILALLKALFLPKRLSIIHCLGHQKGDSAEARGNRLADQAAREAAIKTPPDTSTLL

SEQ ID NO: 3197 - protein, 671 aa, synthetic construct
  source 1..671: note = Description of Artificial Sequence: Synthetic polypeptide
TLGIEDEYRLHETSTEPDVSLGSTWLSDFPQAWAETGGMGLAVRQAPLIIPLKATSTPVSIQQYPMSHEARLGIKPHIQRLLDQGILVPCQSPWNTPLLPVKKPGTNDYRPVQDLREVNKRVEDIHPTVPNPYNLLSGLPPSHQWYTVLDLKDAFFCLRLHPTSQPLFAFEWRDPGMGISGQLTWTRLPQGFKNSPTLFNEALHRDLADFRIQHPDLILLQYVDDILLAATSELDCQQGTRALLQTLGDLGYRASAKKAQICQKQVKYLGYLLREGQRWLTEARKETVMGQPVPKTPRQLREFLGTAGFCRLWIPGFAEMAAPLYPLTKPGTLFSWGPDQQKAYQEIKQALLTAPALGLPDLTKPFELFVDEKQGYAKGVLTQKLGPWRRPVAYLSKKLDPVAAGWPPCLRMVAAIAVLTKDAGKLTMGQPLVILAPHAVEALVKQPPDRWLSNARMTHYQAMLLDTDRVQFGPVVALNPATLLPLPEEGAPHDCLEILAETHGTRPDLTDQPIPDADHTWYTDGSSFLQEGQRKAGAAVTTETEVIWAGALPAGTSAQRAELIALTQALKMAEGKRLNVYTDSRYAFATAHIHGEIYRRRGWLTSEGREIKNKSEILALLKALFLPKRLSIIHCLGHQKGDSAEARGNRLADQAAREAAIKTPPDTSTLL

SEQ ID NO: 3198 - protein, 671 aa, synthetic construct
  source 1..671: note = Description of Artificial Sequence: Synthetic polypeptide
TLNIEDEYRLHETSKEPDVSLGSTWLSDFPQAWAETGGMGLAVRQAPLIIPLKATSTPVSIKQYPMSQEARLGIKPHIQRLLDQGILVPCQSPWNTPLLPVKKPGTNDYRPVQDLREVNKRVEDIHPTVPNPYNLLSGLPPSHQWYTVLDLKDAFFCLRLHPTSQPLFAFEWRDPEMGISGQLTWTRLPQGFKNSPTLFDEALHRDLAGFRIQHPDLILLQYVDDLLLAATSELDCQQGTRALLQTLGDLGYRASAKKAQICQKQVKYLGYLLKEGQRWLTEARKETVMGQPIPKTPRQLREFLGTAGFCRLWIPGFAEMAAPLYPLTKTGTLFNWGPDQQKAFQEIKQALLTAPALGLPDLTKPFELFVDEKQGYAKGVLTQKLGPWRRPVAYLSKKLDPVAAGWPPCLRMVAAIAVLTKDAGKLTMGQPLVILAPHAVEALVKQPPDRWLSNARMTHYQALLLDTDRVQFGPVVALNPATLLPLPEEGLQHDCLDILAEAHGTRSDLMDQPLPDADHTWYTDGSSFLQEGQRKAGAAVTTETEVIWARALPAGTSAQRAELIALTQALKMAEGKKLNVYTDSRYAFATAHIHGEIYRRRGLLTSEGKEIKNKDEILALLKALFLPKRLSIIHCPGHQKGNSAEARGNRMADQAAREVATRETPETSTLL

SEQ ID NO: 3199 - protein, 671 aa, synthetic construct
  source 1..671: note = Description of Artificial Sequence: Synthetic polypeptide
TLNIEDEYRLHETSKEPDVSLGSTWLSDFPQAWAETGGMGLAVRQAPLIIPLKATSTPVSIKQYPMSQEARLGIKPHIQRLLDQGILVPCQSPWNTPLLPVKKPGTNDYRPVQDLREVNKRVEDIHPTVPNPYNLLSGLPPSHQWYTVLDLKDAFFCLRLHPTSQPLFAFEWRDPEMGISGQLTWTRLPQGFKNSPTLFNEALHRDLAGFRIQHPDLILLQYVDDLLLAATSELDCQQGTRALLQTLGDLGYRASAKKAQICQKQVKYLGYLLKEGQRWLTEARKETVMGQPIPKTPRQLREFLGTAGFCRLWIPGFAEMAAPLYPLTKPGTLFNWGPDQQKAFQEIKQALLTAPALGLPDLTKPFELFVDEKQGYAKGVLTQKLGPWRRPVAYLSKKLDPVAAGWPPCLRMVAAIAVLTKDAGKLTMGQPLVILAPHAVEALVKQPPDRWLSNARMTHYQALLLDTDRVQFGPVVALNPATLLPLPEEGLQHDCLDILAEAHGTRSDLMDQPLPDADHTWYTDGSSFLQEGQRKAGAAVTTETEVIWARALPAGTSAQRAELIALTQALKMAEGKKLNVYTDSRYAFATAHIHGEIYRRRGWLTSEGKEIKNKDEILALLKALFLPKRLSIIHCPGHQKGNSAEARGNRMADQAAREVATRETPETSTLL

SEQ ID NO: 3200 - protein, 671 aa, synthetic construct
  source 1..671: note = Description of Artificial Sequence: Synthetic polypeptide
TLNIEDEYRLHETSKEPDVSLGSTWLSDFPQAWAETGGMGLAVRQAPLIIPLKATSTPVSIKQYPMSQEARLGIKPHIQRLLDQGILVPCQSPWNTPLLPVKKPGTNDYRPVQDLREVNKRVEDIHPTVPNPYNLLSGLPPSHQWYTVLDLKDAFFCLRLHPTSQPLFAFEWRDPEMGISGQLTWTRLPQGFKNSPTLFNEALHRDLAGFRIQHPDLILLQYVDDLLLAATSELDCQQGTRALLQTLGDLGYRASAKKAQICQKQVKYLGYLLKEGQRWLTEARKETVMGQPIPKTPRQLREFLGKAGFCRLFIPGFAEMAAPLYPLTKPGTLFNWGPDQQKAFQEIKQALLTAPALGLPDLTKPFELFVDEKQGYAKGVLTQKLGPWRRPVAYLSKKLDPVAAGWPPCLRMVAAIAVLTKDAGKLTMGQPLVILAPHAVEALVKQPPDRWLSNARMTHYQALLLDTDRVQFGPVVALNPATLLPLPEEGLQHDCLDILAEAHGTRSDLMDQPLPDADHTWYTDGSSFLQEGQRKAGAAVTTETEVIWARALPAGTSAQRAELIALTQALKMAEGKKLNVYTDSRYAFATAHIHGEIYRRRGWLTSEGKEIKNKDEILALLKALFLPKRLSIIHCPGHQKGNSAEARGNRMADQAAREVATRETPETSTLL

SEQ ID NO: 3201 - protein, 671 aa, synthetic construct
  source 1..671: note = Description of Artificial Sequence: Synthetic polypeptide
TLNIEDEYRLHETSKGPDVPLGSTWLSDFPQAWAETGGMGLAFRQAPLIISLKATSTPVSIKQYPMSQEARLGIKPHIQRLLDQGILVPCQSPWNTPLLPVKKPGTNDYRPVQDLREVNKRVEDIHPTVPNPYNLLSGLPPSHQWYTVLDLKDAFFCLRLHPTSQSLFAFEWKDPEMGISGQLTWTRLPQGFKNSPTLFDEALHRDLADFRIQHPDLILLQYVDDLLLAATSELDCQQGTRALLQTLGDLGYRASAKKAQICQKQVKYLGYLLKEGQRWLTEARKETVMGQPTPKTPRQLREFLGTAGLCRLWIPGFAEMAAPLYPLTKTGTLFKWGPDQQKAYQEIKQALLTAPALGLPDLTKPFELFVDEKQGYAKGVLTQKLGPWRRPVAYLSKKLDPVAAGWPPCLRMVAAIAVLTKDVGKLTMGQPLVILAPHAVEALVKQPPDRWLSNARMTHYQALLLDTDRVQFGPIVALNPATLLPLPEEGLQHDCLDILAEAHGTRPDLTDQPLPDADHTWYTDGSSFLQEGQRRAGAAVTTETEVIWAKALPAGTSAQRAELIALTQALKMAAGKKLNVYTDSRYAFATAHIHGEIYRRRGLLTSEGKEIKNKDEILALLKALFLPKRLSIIHCPGHQKGNHAEARGNRMADQAAREVATRETPETSTLL

SEQ ID NO: 3202 - protein, 671 aa, synthetic construct
  source 1..671: note = Description of Artificial Sequence: Synthetic polypeptide
TLNIEDEYRLHETSKGPDVPLGSTWLSDFPQAWAETGGMGLAFRQAPLIISLKATSTPVSIKQYPMSQEARLGIKPHIQRLLDQGILVPCQSPWNTPLLPVKKPGTNDYRPVQDLREVNKRVEDIHPTVPNPYNLLSGLPPSHQWYTVLDLKDAFFCLRLHPTSQSLFAFEWKDPEMGISGQLTWTRLPQGFKNSPTLFNEALHRDLADFRIQHPDLILLQYVDDLLLAATSELDCQQGTRALLQTLGDLGYRASAKKAQICQKQVKYLGYLLKEGQRWLTEARKETVMGQPTPKTPRQLREFLGTAGLCRLWIPGFAEMAAPLYPLTKPGTLFKWGPDQQKAYQEIKQALLTAPALGLPDLTKPFELFVDEKQGYAKGVLTQKLGPWRRPVAYLSKKLDPVAAGWPPCLRMVAAIAVLTKDVGKLTMGQPLVILAPHAVEALVKQPPDRWLSNARMTHYQALLLDTDRVQFGPIVALNPATLLPLPEEGLQHDCLDILAEAHGTRPDLTDQPLPDADHTWYTDGSSFLQEGQRRAGAAVTTETEVIWAKALPAGTSAQRAELIALTQALKMAAGKKLNVYTDSRYAFATAHIHGEIYRRRGWLTSEGKEIKNKDEILALLKALFLPKRLSIIHCPGHQKGNHAEARGNRMADQAAREVATRETPETSTLL

SEQ ID NO: 3203 - protein, 671 aa, synthetic construct
  source 1..671: note = Description of Artificial Sequence: Synthetic polypeptide
TLNIEDEYRLHETSKGPDVPLGSTWLSDFPQAWAETGGMGLAFRQAPLIISLKATSTPVSIKQYPMSQEARLGIKPHIQRLLDQGILVPCQSPWNTPLLPVKKPGTNDYRPVQDLREVNKRVEDIHPTVPNPYNLLSGLPPSHQWYTVLDLKDAFFCLRLHPTSQSLFAFEWKDPEMGISGQLTWTRLPQGFKNSPTLFNEALHRDLADFRIQHPDLILLQYVDDLLLAATSELDCQQGTRALLQTLGDLGYRASAKKAQICQKQVKYLGYLLKEGQRWLTEARKETVMGQPTPKTPRQLREFLGKAGLCRLFIPGFAEMAAPLYPLTKPGTLFKWGPDQQKAYQEIKQALLTAPALGLPDLTKPFELFVDEKQGYAKGVLTQKLGPWRRPVAYLSKKLDPVAAGWPPCLRMVAAIAVLTKDVGKLTMGQPLVILAPHAVEALVKQPPDRWLSNARMTHYQALLLDTDRVQFGPIVALNPATLLPLPEEGLQHDCLDILAEAHGTRPDLTDQPLPDADHTWYTDGSSFLQEGQRRAGAAVTTETEVIWAKALPAGTSAQRAELIALTQALKMAAGKKLNVYTDSRYAFATAHIHGEIYRRRGWLTSEGKEIKNKDEILALLKALFLPKRLSIIHCPGHQKGNHAEARGNRMADQAAREVATRETPETSTLL

SEQ ID NO: 3204 - protein, 671 aa, synthetic construct
  source 1..671: note = Description of Artificial Sequence: Synthetic polypeptide
TLNIEDEYRLHETSKGPDVPLGSTWLSDFPQAWAETGGMGLAVRQAPLIIPLKATSTPVSIKQYPMSQEARLGIKPHIQRLLDQGILVPCQSPWNTPLLPVKKPGTNDYRPVQDLREVNKRVEDIHPTVPNPYNLLSGLPPSHQWYTVLDLKDAFFCLRLHPTSQSLFAFEWRDPEMGISGQLTWTRLPQGFKNSPTLFDEALHRDLADFRIQHPDLILLQYVDDLLLAATSELDCQQGTRALLQTLGDLGYRASAKKAQICQKQVKYLGYLLKEGQRWLTEARKETVMGQPTPKTPRQLREFLGTAGFCRLWIPGFAEMAAPLYPLTKTGTLFEWGPDQQKAYQEIKQALLTAPALGLPDLTKPFELFVDEKQGYAKGVLTQKLGPWRRPVAYLSKKLDPVAAGWPPCLRMVAAIAVLTKDAGKLTMGQPLVILAPHAVEALVKQPPDRWLSNARMTHYQALLLDTDRVQFGPIVALNPATLLPLPEEGLQHDCLDILAEAHGTRPDLTDQPLPDADHTWYTDGSSFLQEGQRKAGAAVTTETEVVWAKALPAGTSAQRAELIALTQALKMAEGKKLNVYTDSRYAFATAHIHGEIYRRRGLLTSEGKEIKNKDEILALLKALFLPKRLSIIHCPGHQKGNRAEARGNRMADQAAREVATRETPETSTLL

SEQ ID NO: 3205 - protein, 671 aa, synthetic construct
  source 1..671: note = Description of Artificial Sequence: Synthetic polypeptide
TLNIEDEYRLHETSKGPDVPLGSTWLSDFPQAWAETGGMGLAVRQAPLIIPLKATSTPVSIKQYPMSQEARLGIKPHIQRLLDQGILVPCQSPWNTPLLPVKKPGTNDYRPVQDLREVNKRVEDIHPTVPNPYNLLSGLPPSHQWYTVLDLKDAFFCLRLHPTSQSLFAFEWRDPEMGISGQLTWTRLPQGFKNSPTLFNEALHRDLADFRIQHPDLILLQYVDDLLLAATSELDCQQGTRALLQTLGDLGYRASAKKAQICQKQVKYLGYLLKEGQRWLTEARKETVMGQPTPKTPRQLREFLGTAGFCRLWIPGFAEMAAPLYPLTKPGTLFEWGPDQQKAYQEIKQALLTAPALGLPDLTKPFELFVDEKQGYAKGVLTQKLGPWRRPVAYLSKKLDPVAAGWPPCLRMVAAIAVLTKDAGKLTMGQPLVILAPHAVEALVKQPPDRWLSNARMTHYQALLLDTDRVQFGPIVALNPATLLPLPEEGLQHDCLDILAEAHGTRPDLTDQPLPDADHTWYTDGSSFLQEGQRKAGAAVTTETEVVWAKALPAGTSAQRAELIALTQALKMAEGKKLNVYTDSRYAFATAHIHGEIYRRRGWLTSEGKEIKNKDEILALLKALFLPKRLSIIHCPGHQKGNRAEARGNRMADQAAREVATRETPETSTLL

SEQ ID NO: 3206 - protein, 671 aa, synthetic construct
  source 1..671: note = Description of Artificial Sequence: Synthetic polypeptide
TLNIEDEYRLHETSKGPDVPLGSTWLSDFPQAWAETGGMGLAVRQAPLIIPLKATSTPVSIKQYPMSQEARLGIKPHIQRLLDQGILVPCQSPWNTPLLPVKKPGTNDYRPVQDLREVNKRVEDIHPTVPNPYNLLSGLPPSHQWYTVLDLKDAFFCLRLHPTSQSLFAFEWRDPEMGISGQLTWTRLPQGFKNSPTLFNEALHRDLADFRIQHPDLILLQYVDDLLLAATSELDCQQGTRALLQTLGDLGYRASAKKAQICQKQVKYLGYLLKEGQRWLTEARKETVMGQPTPKTPRQLREFLGKAGFCRLFIPGFAEMAAPLYPLTKPGTLFEWGPDQQKAYQEIKQALLTAPALGLPDLTKPFELFVDEKQGYAKGVLTQKLGPWRRPVAYLSKKLDPVAAGWPPCLRMVAAIAVLTKDAGKLTMGQPLVILAPHAVEALVKQPPDRWLSNARMTHYQALLLDTDRVQFGPIVALNPATLLPLPEEGLQHDCLDILAEAHGTRPDLTDQPLPDADHTWYTDGSSFLQEGQRKAGAAVTTETEVVWAKALPAGTSAQRAELIALTQALKMAEGKKLNVYTDSRYAFATAHIHGEIYRRRGWLTSEGKEIKNKDEILALLKALFLPKRLSIIHCPGHQKGNRAEARGNRMADQAAREVATRETPETSTLL

SEQ ID NO: 3207 - protein, 691 aa, synthetic construct
  source 1..691: note = Description of Artificial Sequence: Synthetic polypeptide
TLNIEDEYRLHETSKEPDVSLGSTWLSDFPQAWAETGGMGLAVRQAPLIIPLKATSTPVSIKQYPMSQEARLGIKPHIQRLLDQGILVPCQSPWNTPLLPVKKPGTNDYRPVQDLREVNKRVEDIHPTVPNPYNLLSGLPPSHQWYTVLDLKDAFFCLRLHPTSQPLFAFEWRDPEMGISGQLTWTRLPQGFKNSPTLFNEALHRDLADFRIQHPDLILLQYVDDLLLAATSELDCQQGTRALLQTLGNLGYRASAKKAQICQKQVKYLGYLLKEGQRWLTEARKETVMGQPTPKTPRQLREFLGKAGFCRLFIPGFAEMAAPLYPLTKPGTLFNWGPDQQKAYQEIKQALLTAPALGLPDLTKPFELFVDEKQGYAKGVLTQKLGPWRRPVAYLSKKLDPVAAGWPPCLRMVAAIAVLTKDAGKLTMGQPLVILAPHAVEALVKQPPDRWLSNARMTHYQALLLDTDRVQFGPVVALNPATLLPLPEEGLQHNCLDILAEAHGTRPDLTDQPLPDADHTWYTDGSSLLQEGQRKAGAAVTTETEVIWAKALPAGTSAQRAELIALTQALKMAEGKKLNVYTDSRYAFATAHIHGEIYRRRGWLTSEGKEIKNKDEILALLKALFLPKRLSIIHCPGHQKGHSAEARGNRMADQAARKAAITETPDTSTLLIENSSPSGGSKRTADGSEFE

SEQ ID NO: 3208 - protein, 671 aa, synthetic construct
  source 1..671: note = Description of Artificial Sequence: Synthetic polypeptide
TLNIEDEHRLHETSKEPDVSLGSTWLSDFPQAWAETGGMGLAVRQAPLIIPLKATSTPVSIKQYPMSQEARLGIKPHIQRLLDQGILVPCQSPWNTPLLPVKKPGTNDYRPVQDLREVNKRVEDIHPTVPNPYNLLSGLPPSHQWYTVLDLKDAFFCLRLHPTSQPLFAFEWRDPEMGISGQLTWTRLPQGFKNSPTLFNEALHRDLADFRIQHPDLILLQYVDDLLLAATSELDCQQGTRALLQTLGNLGYRASAKKAQICQKQVKYLGYLLKEGQRWLTEARKETVMGQPTPKTPRQLREFLGTAGFCRLWIPGFAEMAAPLYPLTKPGTLFNWGPDQQKAYQEIKQALLTAPALGLPDLTKPFELFVDEKQGYAKGVLTQKLGPWRRPVAYLSKKLDPVAAGWPPCLRMVAAIAVLTKDAGKLTMGQPLVILAPHAVEALVKQPPDRWLSNARMTHYQALLLDTDRVQFGPVVALNPATLLPLPEEGLQHNCLDILAEAHGTRPDLTDQPLPDADHTWYTDGSSLLQEGQRKAGAAVTTETEVIWAKALPAGTSAQRAELIALTQALKMAEGKKLNVYTDSRYAFATAHIHGEIYRRRGWLTSEGKEIKNKDEILALLKALFLPKRLSIIHCPGHQKGHSAEARGNRMADQAARKAAITETPDTSTLL

SEQ ID NO: 3209 - protein, 671 aa, synthetic construct
  source 1..671: note = Description of Artificial Sequence: Synthetic polypeptide
TLNIEDEHRLHETSKEPDVSLGSTWLSDFPQAWAETGGMGLAVRQAPLIIPLKATSTPVSIKQYPMSQEARLGIKPHIQRLLDQGILVPCQSPWNTPLLPVKKPGTNDYRPVQDLREVNKRVEDIHPTVPNPYNLLSGLPPSHQWYTVLDLKDAFFCLRLHPTSQPLFAFEWRDPEMGISGQLTWTRLPQGFKNSPTLFNEALHRDLADFRIQHPDLILLQYVDDLLLAATSELDCQQGTRALLQTLGNLGYRASAKKAQICQKQVKYLGYLLKEGQRWLTEARKETVMGQPTPKTPRQLREFLGKAGFCRLFIPGFAEMAAPLYPLTKPGTLFNWGPDQQKAYQEIKQALLTAPALGLPDLTKPFELFVDEKQGYAKGVLTQKLGPWRRPVAYLSKKLDPVAAGWPPCLRMVAAIAVLTKDAGKLTMGQPLVILAPHAVEALVKQPPDRWLSNARMTHYQALLLDTDRVQFGPVVALNPATLLPLPEEGLQHNCLDILAEAHGTRPDLTDQPLPDADHTWYTDGSSLLQEGQRKAGAAVTTETEVIWAKALPAGTSAQRAELIALTQALKMAEGKKLNVYTDSRYAFATAHIHGEIYRRRGWLTSEGKEIKNKDEILALLKALFLPKRLSIIHCPGHQKGHSAEARGNRMADQAARKAAITETPDTSTLL

SEQ ID NO: 3210 - protein, 671 aa, synthetic construct
  source 1..671: note = Description of Artificial Sequence: Synthetic polypeptide
TLNIEDEYRLHEISTEPDVSPGSTWLSDFPQAWAETGGMGLAVRQAPLIIPLKATSTPVSIKQYPMSQEAKLGIKPHIQRLLDQGILVPCQSPWNTPLLPVKKPGTNDYRPVQGLREVNKRVEDIHPTVPNPYNLLSGLPTSHRWYTVLDLKDAFFCLRLHPTSQPLFASEWRDPGMGISGQLTWTRLPQGFKNSPTLFDEALHRGLADFRIQHPDLILLQYVDDLLLAATSELDCQQGTRALLKTLGNLGYRASAKKAQICQKQVKYLGYLLREGQRWLTEARKETVMGQPTPKTPRQLREFLGTAGFCRLWIPRFAEMAAPLYPLTKTGTLFNWGPDQQKAYHEIKQALLTAPALGLPDLTKPFELFVDEKQGYAKGVLTQKLGPWRRPVAYLSKKLDPVAAGWPPCLRMVAAIAVLTKDAGKLTMGQPLVILAPHAVEALVKQPPDRWLSNARMTHYQAMLLDTDRVQFGPVVALNPATLLPLPEEGAPHDCLEILAETHGTEPDLTDQPIPDADHTWYTDGSSFLQEGQRKAGAAVTTETEVIWARALPAGTSAQRAELIALTQALKMAEGKRLNVYTDSRYAFATAHIHGEIYKRRGLLTSEGREIKNKSEILALLKALFLPKRLSIIHCLGHQKGDSAEARGNRLADQAAREAAIKTPPDTSTLL

SEQ ID NO: 3211 - protein, 671 aa, synthetic construct
  source 1..671: note = Description of Artificial Sequence: Synthetic polypeptide
TLNIEDEYRLHEISTEPDVSPGSTWLSDFPQAWAETGGMGLAVRQAPLIIPLKATSTPVSIKQYPMSQEAKLGIKPHIQRLLDQGILVPCQSPWNTPLLPVKKPGTNDYRPVQGLREVNKRVEDIHPTVPNPYNLLSGLPTSHRWYTVLDLKDAFFCLRLHPTSQPLFASEWRDPGMGISGQLTWTRLPQGFKNSPTLFNEALHRGLADFRIQHPDLILLQYVDDLLLAATSELDCQQGTRALLKTLGNLGYRASAKKAQICQKQVKYLGYLLREGQRWLTEARKETVMGQPTPKTPRQLREFLGTAGFCRLWIPRFAEMAAPLYPLTKPGTLFNWGPDQQKAYHEIKQALLTAPALGLPDLTKPFELFVDEKQGYAKGVLTQKLGPWRRPVAYLSKKLDPVAAGWPPCLRMVAAIAVLTKDAGKLTMGQPLVILAPHAVEALVKQPPDRWLSNARMTHYQAMLLDTDRVQFGPVVALNPATLLPLPEEGAPHDCLEILAETHGTEPDLTDQPIPDADHTWYTDGSSFLQEGQRKAGAAVTTETEVIWARALPAGTSAQRAELIALTQALKMAEGKRLNVYTDSRYAFATAHIHGEIYKRRGWLTSEGREIKNKSEILALLKALFLPKRLSIIHCLGHQKGDSAEARGNRLADQAAREAAIKTPPDTSTLL

SEQ ID NO: 3212 - protein, 671 aa, synthetic construct
  source 1..671: note = Description of Artificial Sequence: Synthetic polypeptide
TLNIEDEYRLHEISTEPDVSPGSTWLSDFPQAWAETGGMGLAVRQAPLIIPLKATSTPVSIKQYPMSQEAKLGIKPHIQRLLDQGILVPCQSPWNTPLLPVKKPGTNDYRPVQGLREVNKRVEDIHPTVPNPYNLLSGLPTSHRWYTVLDLKDAFFCLRLHPTSQPLFASEWRDPGMGISGQLTWTRLPQGFKNSPTLFNEALHRGLADFRIQHPDLILLQYVDDLLLAATSELDCQQGTRALLKTLGNLGYRASAKKAQICQKQVKYLGYLLREGQRWLTEARKETVMGQPTPKTPRQLREFLGKAGFCRLFIPRFAEMAAPLYPLTKPGTLFNWGPDQQKAYHEIKQALLTAPALGLPDLTKPFELFVDEKQGYAKGVLTQKLGPWRRPVAYLSKKLDPVAAGWPPCLRMVAAIAVLTKDAGKLTMGQPLVILAPHAVEALVKQPPDRWLSNARMTHYQAMLLDTDRVQFGPVVALNPATLLPLPEEGAPHDCLEILAETHGTEPDLTDQPIPDADHTWYTDGSSFLQEGQRKAGAAVTTETEVIWARALPAGTSAQRAELIALTQALKMAEGKRLNVYTDSRYAFATAHIHGEIYKRRGWLTSEGREIKNKSEILALLKALFLPKRLSIIHCLGHQKGDSAEARGNRLADQAAREAAIKTPPDTSTLL

SEQ ID NO: 3213 - protein, 691 aa, synthetic construct
  source 1..691: note = Description of Artificial Sequence: Synthetic polypeptide
VQEISDSRPMLHIYLNGRRFLGLLDTGADKTCIAGRDWPANWPIHQTESSLQGLGMACGVARSSQPLRWQHEDKSGIIHPFVIPTLPFTLWGRDIMKDIKVRLMTDSPDDSQDLMIGAIESNLFADQISWKSDQPVWLNQWPLKQEKLQALQQLVTEQLQLGHLEESNSPWNTPVFVIKKKSGKWRLLQDLRAVNATMHDMGALQPGLPSPVAVPKGWEIIIIDLQDCFFNIKLHPEDCKRFAFSVPSPNFKRPYQRFQWKVLPQGMKNSPTLCQKFVDKAILTVRDKYQDSYIVHYMDDILLAHPSRSIVDEILTSMIQALNKHGLVVSTEKIQKYDNLKYLGTHIQGDSVSYQKLQIRTDKLRTLNDFQKLLGNINWIRPFLKLTTGELKPLFEILNGDSNPISTRKLTPEACKALQLMNERLSTARVKRLDLSQPWSLCILKTEYTPTACLWQDGVVEWIHLPHISPKVITPYDIFCTQLIIKGRHRSKELFSKDPDYIVVPYTKVQFDLLLQEKEDWPISLLGFLGEVHFHLPKDPLLTFTLQTAIIFPHMTSTTPLEKGIVIFTDGSANGRSVTYIQGREPIIKENTQNTAQQAEIVAVITAFEEVSQPFNLYTDSKYVTGLFPEIETATLSPRTKIYTELKHLQRLIHKRQEKFYIGHIRGHTGLPGPLAQGNAYADSLTRILTA

SEQ ID NO: 3214 - protein, 691 aa, synthetic construct
  source 1..691: note = Description of Artificial Sequence: Synthetic polypeptide
WVQEISDSRPMLHIYLNGRRFLGLLNTGADKTCIAGRDWPANWPIHQTESSLQGLGMACGVARSSQPLRWQHEDKSGIIHPFVIPTLPFTLWGRDIMKDIKVRLMTDSPDDSQDLMIGAIESNLFADQISWKSDQPVWLNQWPLKQEKLQALQQLVTEQLQLGHLEESNSPWNTPVFVIKKKSGKWRLLQDLRAVNATMHDMGALQPGLPSPVAVPKGWEIIIIDLQDCFFNIKLHPEDCKRFAFSVPSPNFKRPYQRFQWKVLPQGMKNSPTLCQKFVDKAILTVRDKYQDSYIVHYMDDILLAHPSRSIVDEILTSMIQALNKHGLVVSTEKIQKYDNLKYLGTHIQGDSVSYQKLQIRTDKLRTLNDFQKLLGNINWIRPFLKLTTGELKPLFEILNGDSNPISTRKLTPEACKALQLMNERLSTARVKRLDLSQPWSLCILKTEYTPTACLWQDGVVEWIHLPHISPKVITPYDIFCTQLIIKGRHRSKELFSKDPDYIVVPYTKVQFDLLLQEKEDWPISLLGFLGEVHFHLPKDPLLTFTLQTAIIFPHMTSTTPLEKGIVIFTDGSANGRSVTYIQGREPIIKENTQNTAQQAEIVAVITAFEEVSQPFNLYTDSKYVTGLFPEIETATLSPRTKIYTELKHLQRLIHKRQEKFYIGHIRGHTGLPGPLAQGNAYADSLTRILT

SEQ ID NO: 3215 - protein, 599 aa, synthetic construct
  source 1..599: note = Description of Artificial Sequence: Synthetic polypeptide
GRDIMKDIKVRLMTDSPDDSQDLMIGAIESNLFADQISWKSDQPVWLNQWPLKQEKLQALQQLVTEQLQLGHLEESNSPWNTPVFVIKKKSGKWRLLQDLRAVNATMHDMGALQPGLPSPVAVPKGWEIIIIDLQDCFFNIKLHPEDCKRFAFSVPSPNFKRPYQRFQWKVLPQGMKNSPTLCQKFVDKAILTVRDKYQDSYIVHYMDDILLAHPSRSIVDEILTSMIQALNKHGLVVSTEKIQKYDNLKYLGTHIQGDSVSYQKLQIRTDKLRTLNDFQKLLGNINWIRPFLKLTTGELKPLFEILNGDSNPISTRKLTPEACKALQLMNERLSTARVKRLDLSQPWSLCILKTEYTPTACLWQDGVVEWIHLPHISPKVITPYDIFCTQLIIKGRHRSKELFSKDPDYIVVPYTKVQFDLLLQEKEDWPISLLGFLGEVHFHLPKDPLLTFTLQTAIIFPHMTSTTPLEKGIVIFTDGSANGRSVTYIQGREPIIKENTQNTAQQAEIVAVITAFEEVSQPFNLYTDSKYVTGLFPEIETATLSPRTKIYTELKHLQRLIHKRQEKFYIGHIRGHTGLPGPLAQGNAYADSLTRILT

SEQ ID NO: 3216 - protein, 599 aa, synthetic construct
  source 1..599: note = Description of Artificial Sequence: Synthetic polypeptide
GRDIMKDIKVRLMTDSPDDSQDLMIGAIESNLFADQISWKSDQPVWLNQWPLKQEKLQALQQLVTEQLQLGHLEESNSPWNTPVFVIKKKSGKWRLLQDLRAVNATMHDMGALQPGLPSPVAVPKGWEIIIIDLQDCFFNIKLHPEDCKRFAFSVPSPNFKRPYQRFQWKVLPQGMKNSPTLCQKFVDKAILTVRDKYQDSYIVHYMDDILLAHPSRSIVDEILTSMIQALNKHGLVVSTEKIQKYDNLKYLGTHIQGDSVSYQKLQIRTDKLRTLNDFQKLLGNINWIRPFLKLTTGELKPLFEILNPDSNPISTRKLTPEACKALQLMNERLSTARVKRLDLSQPWSLCILKTEYTPTACLWQDGVVEWIHLPHISPKVITPYDIFCTQLIIKGRHRSKELFSKDPDYIVVPYTKVQFDLLLQEKEDWPISLLGFLGEVHFHLPKDPLLTFTLQTAIIFPHMTSTTPLEKGIVIFTDGSANGRSVTYIQGREPIIKENTQNTAQQAEIVAVITAFEEVSQPFNLYTDSKYVTGLFPEIETATLSPRTKIYTELKHLQRLIHKRQEKFYIGHIRGHTGLPGPLAQGNAYADSLTRILT

SEQ ID NO: 3217 - protein, 599 aa, synthetic construct
  source 1..599: note = Description of Artificial Sequence: Synthetic polypeptide
GRDIMKDIKVRLMTDSPDDSQDLMIGAIESNLFADQISWKSDQPVWLNQWPLKQEKLQALQQLVTEQLQLGHLEESNSPWNTPVFVIKKKSGKWRLLQDLRAVNATMHDMGALQPGLPSPVAPPKGWEIIIIDLQDCFFNIKLHPEDCKRFAFSVPSPNFKRPYQRFQWKVLPQGMKNSPTLCQKFVDKAILTVRDKYQDSYIVHYMDDILLAHPSRSIVDEILTSMIQALNKHGLVVSTEKIQKYDNLKYLGTHIQGDSVSYQKLQIRTDKLRTLNDFQKLLGNINWIRPFLKLTTGELKPLFEILNPDSNPISTRKLTPEACKALQLMNERLSTARVKRLDLSQPWSLCILKTEYTPTACLWQDGVVEWIHLPHISPKVITPYDIFCTQLIIKGRHRSKELFSKDPDYIVVPYTKVQFDLLLQEKEDWPISLLGFLGEVHFHLPKDPLLTFTLQTAIIFPHMTSTTPLEKGIVIFTDGSANGRSVTYIQGREPIIKENTQNTAQQAEIVAVITAFEEVSQPFNLYTDSKYVTGLFPEIETATLSPRTKIYTELKHLQRLIHKRQEKFYIGHIRGHTGLPGPLAQGNAYADSLTRILT

SEQ ID NO: 3218 - protein, 691 aa, synthetic construct
  source 1..691: note = Description of Artificial Sequence: Synthetic polypeptide
WVQEISDSRPMLHIYLNGRRFLGLLNTGADKTCIAGRDWPANWPIHQTESSLQGLGMACGVARSSQPLRWQHEDKSGIIHPFVIPTLPFTLWGRDIMKDIKVRLMTDSPDDSQDLMIGAIESNLFADQISWKSDQPVWLNQWPLKQEKLQALQQLVTEQLQLGHLEESNSPWNTPVFVIKKKSGKWRLLQDLRAVNATMHDMGALQPGLPSPVAVPKGWEIIIIDLQDCFFNIKLHPEDCKRFAFSVPSPNFKRPYQRFQWKVLPQGMKNSPTLCQKFVDKAILTVRDKYQDSYIVHYMDDILLAHPSRSIVDEILTSMIQALNKHGLVVSTEKIQKYDNLKYLGTHIQGDSVSYQKLQIRTDKLRTLNDFQKLLGNINWIRPFLKLTTGELKPLFEILNPDSNPISTRKLTPEACKALQLMNERLSTARVKRLDLSQPWSLCILKTEYTPTACLWQDGVVEWIHLPHISPKVITPYDIFCTQLIIKGRHRSKELFSKDPDYIVVPYTKVQFDLLLQEKEDWPISLLGFLGEVHFHLPKDPLLTFTLQTAIIFPHMTSTTPLEKGIVIFTDGSANGRSVTYIQGREPIIKENTQNTAQQAEIVAVITAFEEVSQPFNLYTDSKYVTGLFPEIETATLSPRTKIYTELKHLQRLIHKRQEKFYIGHIRGHTGLPGPLAQGNAYADSLTRILT

SEQ ID NO: 3219 - protein, 691 aa, synthetic construct
  source 1..691: note = Description of Artificial Sequence: Synthetic polypeptide
WVQEISDSRPMLHIYLNGRRFLGLLNTGADKTCIAGRDWPANWPIHQTESSLQGLGMACGVARSSQPLRWQHEDKSGIIHPFVIPTLPFTLWGRDIMKDIKVRLMTDSPDDSQDLMIGAIESNLFADQISWKSDQPVWLNQWPLKQEKLQALQQLVTEQLQLGHLEESNSPWNTPVFVIKKKSGKWRLLQDLRAVNATMHDMGALQPGLPSPVAPPKGWEIIIIDLQDCFFNIKLHPEDCKRFAFSVPSPNFKRPYQRFQWKVLPQGMKNSPTLCQKFVDKAILTVRDKYQDSYIVHYMDDILLAHPSRSIVDEILTSMIQALNKHGLVVSTEKIQKYDNLKYLGTHIQGDSVSYQKLQIRTDKLRTLNDFQKLLGNINWIRPFLKLTTGELKPLFEILNPDSNPISTRKLTPEACKALQLMNERLSTARVKRLDLSQPWSLCILKTEYTPTACLWQDGVVEWIHLPHISPKVITPYDIFCTQLIIKGRHRSKELFSKDPDYIVVPYTKVQFDLLLQEKEDWPISLLGFLGEVHFHLPKDPLLTFTLQTAIIFPHMTSTTPLEKGIVIFTDGSANGRSVTYIQGREPIIKENTQNTAQQAEIVAVITAFEEVSQPFNLYTDSKYVTGLFPEIETATLSPRTKIYTELKHLQRLIHKRQEKFYIGHIRGHTGLPGPLAQGNAYADSLTRILT

SEQ ID NO: 3220 - protein, 691 aa, synthetic construct
  source 1..691: note = Description of Artificial Sequence: Synthetic polypeptide
VQEISDSRPMLHIYLNGRRFLGLLDTGADKTCIAGRDWPANWPIHQTESSLQGLGMACGVARSSQPLRWQHEDKSGIIHPFVIPTLPFTLWGRDIMKDIKVRLMTDSPDDSQDLMIGAIESNLFADQISWKSDQPVWLNQWPLKQEKLQALQQLVTEQLQLGHLEESNSPWNTPVFVIKKKSGKWRLLQDLRAVNATMHDMGALQPGLPSPPAVPKGWEIIIIDLQDCFFNIKLHPEDCKRFAFSVPSPNFKRPYQRFQWKVLPQGMKNSPTLCQKFVDKAILTVRDKYQDSYIVHYMDDILLAHPSRSIVDEILTSMIQALNKHGLVVSTEKIQKYDNLKYLGTHIQGDSVSYQKLQIRTDKLRTLNDFQKLLGNINWIRPFLKLTTGELKPLFEILNPDSNPISTRKLTPEACKALQLMNERLSTARVKRLDLSQPWSLCILKTEYTPTACLWQDGVVEWIHLPHISPKVITPYDIFCTQLIIKGRHRSKELFSKDPDYIVVPYTKVQFDLLLQEKEDWPISLLGFLGEVHFHLPKDPLLTFTLQTAIIFPHMTSTTPLEKGIVIFTDGSANGRSVTYIQGREPIIKENTQNTAQQAEIVAVITAFEEVSQPFNLYTDSKYVTGLFPEIETATLSPRTKIYTELKHLQRLIHKRQEKFYIGHIRGHTGLPGPLAQGNAYADSLTRILTA

SEQ ID NO: 3221 - protein, 691 aa, synthetic construct
  source 1..691: note = Description of Artificial Sequence: Synthetic polypeptide
VQEISDSRPMLHIYLNGRRFLGLLDTGADKTCIAGRDWPANWPIHQTESSLQGLGMACGVARSSQPLRWQHEDKSGIIHPFVIPTLPFTLWGRDIMKDIKVRLMTDSPDDSQDLMIGAIESNLFADQISWKSDQPVWLNQWPLKQEKLQALQQLVTEQLQLGHLEESNSPWNTPVFVIKKKSGKWRLLQDLRAVNATMHDMGALQPGLPSPVAVPKGWEIIIIDLQDCFFNIKLHPEDCKRFAFSVPSPNFKRPYQRFQWKVLPQGMKNSPTLCQKFVDKAILTVRDKYQDSYIVHYMDDILLAHPSRSIVDEILTSMIQALNKHGLVVSTEKIQKYDNLKYLGTHIQGDSVSYQKLQIRTDKLRTLNDFQKLLGNINWIRPFLKLTTGELKPLFEILNPDSNPISTRKLTPEACKALQLMNERLSTARVKRLDLSQPWSLCILKTEYTPTACLWQDGVVEWIHLPHISPKVITPYDIFCTQLIIKGRHRSKELFSKDPDYIVVPYTKVQFDLLLQEKEDWPISLLGFLGEVHFHLPKDPLLTFTLQTAIIFPHMTSTTPLEKGIVIFTDGSANGRSVTYIQGREPIIKENTQNTAQQAEIVAVITAFEEVSQPFNLYTDSKYVTGLFPEIETATLSPRTKIYTELKHLQRLIHKRQEKFYIGHIRGHTGLPGPLAQGNAYADSLTRILTA

SEQ ID NO: 3222 - protein, 585 aa, synthetic construct
  source 1..585: note = Description of Artificial Sequence: Synthetic polypeptide
LTAAIDILAPQQCAEPITWKSDEPVWVDQWPLTNDKLAAAQQLVQEQLEAGHITESSSPWNTPIFVIKKKSGKWRLLQDLRAVNATMVLMGALQPGLPSPVAIPQGYLKIIIDLKDCFFSIPLHPSDQKRFAFSLPSTNFKEPMQRFQWKVLPQGMANSPTLCQKYVATAIHKVRHAWKQMYIIHYMDDILIAGKDGQQVLQCFDQLKQELTAAGLHIAPEKVQLQDPYTYLGFELNGPKITNQKAVIRKDKLQTLNDFQKLLGDINWLRPYLKLTTGDLKPLFDTLKGDSDPNSHRSLSKEALASLEKVETAIAEQFVTHINYSLPLIFLIFNTALTPTGLFWQDNPIMWIHLPASPKKVLLPYYDAIADLIILGRDHSKKYFGIEPSTIIQPYSKSQIDWLMQNTEMWPIACASFVGILDNHYPPNKLIQFCKLHTFVFPQIISKTPLNNALLVFTDGSSTGMAAYTLTDTTIKFQTNLNSAQLVELQALIAVLSAFPNQPLNIYTDSAYLAHSIPLLETVAQIKHISETAKLFLQCQQLIYNRSIPFYIGHVRAHSGLPGPIAQGNQRADLATKIVASNINT

SEQ ID NO: 3223 - protein, 585 aa, synthetic construct
  source 1..585: note = Description of Artificial Sequence: Synthetic polypeptide
LTAAIDILAPQQCAEPITWKSDEPVWVDQWPLTNDKLAAAQQLVQEQLEAGHITESSSPWNTPIFVIKKKSGKWRLLQDLRAVNATMVLMGALQPGLPSPVAIPQGYLKIIIDLKDCFFSIPLHPSDQKRFAFSLPSTNFKEPMQRFQWKVLPQGMANSPTLCQKYVATAIHKVRHAWKQMYIIHYMDDILIAGKDGQQVLQCFDQLKQELTAAGLHIAPEKVQLQDPYTYLGFELNGPKITNQKAVIRKDKLQTLNDFQKLLGDINWLRPYLKLTTGDLKPLFDTLKPDSDPNSHRSLSKEALASLEKVETAIAEQFVTHINYSLPLIFLIFNTALTPTGLFWQDNPIMWIHLPASPKKVLLPYYDAIADLIILGRDHSKKYFGIEPSTIIQPYSKSQIDWLMQNTEMWPIACASFVGILDNHYPPNKLIQFCKLHTFVFPQIISKTPLNNALLVFTDGSSTGMAAYTLTDTTIKFQTNLNSAQLVELQALIAVLSAFPNQPLNIYTDSAYLAHSIPLLETVAQIKHISETAKLFLQCQQLIYNRSIPFYIGHVRAHSGLPGPIAQGNQRADLATKIVASNINT

SEQ ID NO: 3224 - protein, 585 aa, synthetic construct
  source 1..585: note = Description of Artificial Sequence: Synthetic polypeptide
LTAAIDILAPQQCAEPITWKSDEPVWVDQWPLTNDKLAAAQQLVQEQLEAGHITESSSPWNTPIFVIKKKSGKWRLLQDLRAVNATMVLMGALQPGLPSPVAPPQGYLKIIIDLKDCFFSIPLHPSDQKRFAFSLPSTNFKEPMQRFQWKVLPQGMANSPTLCQKYVATAIHKVRHAWKQMYIIHYMDDILIAGKDGQQVLQCFDQLKQELTAAGLHIAPEKVQLQDPYTYLGFELNGPKITNQKAVIRKDKLQTLNDFQKLLGDINWLRPYLKLTTGDLKPLFDTLKPDSDPNSHRSLSKEALASLEKVETAIAEQFVTHINYSLPLIFLIFNTALTPTGLFWQDNPIMWIHLPASPKKVLLPYYDAIADLIILGRDHSKKYFGIEPSTIIQPYSKSQIDWLMQNTEMWPIACASFVGILDNHYPPNKLIQFCKLHTFVFPQIISKTPLNNALLVFTDGSSTGMAAYTLTDTTIKFQTNLNSAQLVELQALIAVLSAFPNQPLNIYTDSAYLAHSIPLLETVAQIKHISETAKLFLQCQQLIYNRSIPFYIGHVRAHSGLPGPIAQGNQRADLATKIVASNINT

SEQ ID NO: 3225 - protein, 663 aa, synthetic construct
  source 1..663: note = Description of Artificial Sequence: Synthetic polypeptide
LDDEYRLYSPLVKPDQNIQFWLEQFPQAWAETAGMGLAKQVPPQVIQLKASATPVSVRQYPLSKEAQEGIRPHVQRLIQQGILVPVQSPWNTPLLPVRKPGTNDYRPVQDLREVNKRVQDIHPTVPNPYNLLCALPPQRSWYTVLDLKDAFFCLRLHPTSQPLFAFEWRDPGTGRTGQLTWTRLPQGFKNSPTIFNEALHRDLANFRIQHPQVTLLQYVDDLLLAGATKQDCLEGTKALLLELSDLGYRASAKKAQICRREVTYLGYSLRDGQRWLTEARKKTVVQIPAPTTAKQVREFLGKAGFCRLFIPGFATLAAPLYPLTKPKGEFSWAPEHQKAFDAIKKALLSAPALALPDVTKPFTLYVDERKGVARGVLTQTLGPWRRPVAYLSKKLDPVASGWPVCLKAIAAVAILVKDADKLTLGQNITVIAPHALENIVRQPPDRWMTNARMTHYQSLLLTERVTFAPPAALNPATLLPEETDEPVTHDCHQLLIEETGVRKDLTDIPLTGEVLTWFTDGSSYVVEGKRMAGAAVVDGTRTIWASSLPEGTSAQKAELMALTQALRLAEGKSINIYTDSRYAFATAHVHGAIYKQRGWLTSAGREIKNKEEILSLLEALHLPKRLAIIHCPGHQKAKDPISRGNQMADRVAKQAAQGVNLLP

SEQ ID NO: 3226 - protein, 665 aa, synthetic construct
  source 1..665: note = Description of Artificial Sequence: Synthetic polypeptide
TLQLDDEYRLYSPLVKPDQNIQFWLEQFPQAWAETAGMGLAKQVPPQVIQLKASATPVSVRQYPLSKEAQEGIRPHVQRLIQQGILVPVQSPWNTPLLPVRKPGTNDYRPVQDLREVNKRVQDIHPTVPNPYNLLCALPPQRSWYTVLDLKDAFFCLRLHPTSQPLFAFEWRDPGTGRTGQLTWTRLPQGFKNSPTIFDEALHRDLANFRIQHPQVTLLQYVDDLLLAGATKQDCLEGTKALLLELSDLGYRASAKKAQICRREVTYLGYSLRDGQRWLTEARKKTVVQIPAPTTAKQVREFLGTAGFCRLWIPGFATLAAPLYPLTKEKGEFSWAPEHQKAFDAIKKALLSAPALALPDVTKPFTLYVDERKGVARGVLTQTLGPWRRPVAYLSKKLDPVASGWPVCLKAIAAVAILVKDADKLTLGQNITVIAPHALENIVRQPPDRWMTNARMTHYQSLLLTERVTFAPPAALNPATLLPEETDEPVTHDCHQLLIEETGVRKDLTDIPLTGEVLTWFTDGSSYVVEGKRMAGAAVVDGTRTIWASSLPEGTSAQKAELMALTQALRLAEGKSINIYTDSRYAFATAHVHGAIYKQRGLLTSAGREIKNKEEILSLLEALHLPKRLAIIHCPGHQKAKDPISRGNQMADRVAKQAAQGVNLL

SEQ ID NO: 3227 - protein, 665 aa, synthetic construct
  source 1..665: note = Description of Artificial Sequence: Synthetic polypeptide
TLQLDDEYRLYSPLVKPDQNIQFWLEQFPQAWAETAGMGLAKQVPPQVIQLKASATPVSVRQYPLSKEAQEGIRPHVQRLIQQGILVPVQSPWNTPLLPVRKPGTNDYRPVQDLREVNKRVQDIHPTVPNPYNLLCALPPQRSWYTVLDLKDAFFCLRLHPTSQPLFAFEWRDPGTGRTGQLTWTRLPQGFKNSPTIFNEALHRDLANFRIQHPQVTLLQYVDDLLLAGATKQDCLEGTKALLLELSDLGYRASAKKAQICRREVTYLGYSLRDGQRWLTEARKKTVVQIPAPTTAKQVREFLGTAGFCRLWIPGFATLAAPLYPLTKPKGEFSWAPEHQKAFDAIKKALLSAPALALPDVTKPFTLYVDERKGVARGVLTQTLGPWRRPVAYLSKKLDPVASGWPVCLKAIAAVAILVKDADKLTLGQNITVIAPHALENIVRQPPDRWMTNARMTHYQSLLLTERVTFAPPAALNPATLLPEETDEPVTHDCHQLLIEETGVRKDLTDIPLTGEVLTWFTDGSSYVVEGKRMAGAAVVDGTRTIWASSLPEGTSAQKAELMALTQALRLAEGKSINIYTDSRYAFATAHVHGAIYKQRGWLTSAGREIKNKEEILSLLEALHLPKRLAIIHCPGHQKAKDPISRGNQMADRVAKQAAQGVNLL

SEQ ID NO: 3228 - protein, 751 aa, synthetic construct
  source 1..751: note = Description of Artificial Sequence: Synthetic polypeptide
MDPLQLLQPLEAEIKGTKLKAHWNSGATITCVPEAFLEDERPIQTMLIKTIHGEKQQDVYYLTFKVQGRKVEAEVLASPYDYILLNPSDVPWLMKKPLQLTVLVPLHEYQERLLQQTALPKEQKELLQKLFLKYDALWQHWENQVGHRRIKPHNIATGTLAPRPQKQYPINPKAKPSIQIVIDDLLKQGVLIQQNSTMNTPVYPVPKPDGKWRMVLDYREVNKTIPLIAAQNQHSAGILSSIYRGKYKTTLDLTNGFWAHPITPESYWLTAFTWQGKQYCWTRLPQGFLNSPALFTADVVDLLKEIPNVQAYVDDIYISHDDPQEHLEQLEKIFSILLNAGYVVSLKKSEIAQREVEFLGFNITKEGRGLTDTFKQKLLNITPPKDLKQLQSILGLLNFARNFIPNYSELVKPLYTIVANANGKFISWTEDNSNQLQHIISVLNQADNLEERNPETRLIIKVNSSPSAGYIRYYNEGSKRPIMYVNYIFSKAEAKFTQTEKLLTTMHKGLIKAMDLAMGQEILVYSPIVSMTKIQRTPLPERKALPVRWITWMTYLEDPRIQFHYDKSLPELQQIPNVTEDVIAKTKHPSEFAMVFYTDGSAIKHPDVNKSHSAGMGIAQVQFIPEYKIVHQWSIPLGDHTAQLAEIAAVEFACKKALKISGPVLIVTDSFYVAESANKELPYWKSNGFLNNKKKPLRHVSKWKSIAECLQLKPDIIIMHEKGHQQPMTTLHTEGNNLADKLATQGSYVVH

SEQ ID NO: 3229 - protein, 662 aa, synthetic construct
  source 1..662: note = Description of Artificial Sequence: Synthetic polypeptide
VPWLMKKPLQLTVLVPLHEYQERLLQQTALPKEQKELLQKLFLKYDALWQHWENQVGHRRIKPHNIATGTLAPRPQKQYPINPKAKPSIQIVIDDLLKQGVLIQQNSTMNTPVYPVPKPDGKWRMVLDYREVNKTIPLIAAQNQHSAGILSSIYRGKYKTTLDLTNGFWAHPITPESYWLTAFTWQGKQYCWTRLPQGFLNSPALFTADVVDLLKEIPNVQAYVDDIYISHDDPQEHLEQLEKIFSILLNAGYVVSLKKSEIAQREVEFLGFNITKEGRGLTDTFKQKLLNITPPKDLKQLQSILGLLNFARNFIPNYSELVKPLYTIVANANGKFISWTEDNSNQLQHIISVLNQADNLEERNPETRLIIKVNSSPSAGYIRYYNEGSKRPIMYVNYIFSKAEAKFTQTEKLLTTMHKGLIKAMDLAMGQEILVYSPIVSMTKIQRTPLPERKALPVRWITWMTYLEDPRIQFHYDKSLPELQQIPNVTEDVIAKTKHPSEFAMVFYTDGSAIKHPDVNKSHSAGMGIAQVQFIPEYKIVHQWSIPLGDHTAQLAEIAAVEFACKKALKISGPVLIVTDSFYVAESANKELPYWKSNGFLNNKKKPLRHVSKWKSIAECLQLKPDIIIMHEKGHQQPMTTLHTEGNNLADKLATQGSYVVH

SEQ ID NO: 3230 - protein, 662 aa, synthetic construct
  source 1..662: note = Description of Artificial Sequence: Synthetic polypeptide
VPWLMKKPLQLTVLVPLHEYQERLLQQTALPKEQKELLQKLFLKYDALWQHWENQVGHRRIKPHNIATGTLAPRPQKQYPINPKAKPSIQIVIDDLLKQGVLIQQNSTMNTPVYPVPKPDGKWRMVLDYREVNKTIPLIAAQNQHSAGILSSIYRGKYKTTLDLTNGFWAHPITPESYWLTAFTWQGKQYCWTRLPQGFLNSPALFNADVVDLLKEIPNVQAYVDDIYISHDDPQEHLEQLEKIFSILLNAGYVVSLKKSEIAQREVEFLGFNITKEGRGLTDTFKQKLLNITPPKDLKQLQSILGLLNFARNFIPNYSELVKPLYTIVAPANGKFISWTEDNSNQLQHIISVLNQADNLEERNPETRLIIKVNSSPSAGYIRYYNEGSKRPIMYVNYIFSKAEAKFTQTEKLLTTMHKGLIKAMDLAMGQEILVYSPIVSMTKIQRTPLPERKALPVRWITWMTYLEDPRIQFHYDKSLPELQQIPNVTEDVIAKTKHPSEFAMVFYTDGSAIKHPDVNKSHSAGMGIAQVQFIPEYKIVHQWSIPLGDHTAQLAEIAAVEFACKKALKISGPVLIVTDSFYVAESANKELPYWKSNGFLNNKKKPLRHVSKWKSIAECLQLKPDIIIMHEKGHQQPMTTLHTEGNNLADKLATQGSYVVH

SEQ ID NO: 3231 - protein, 662 aa, synthetic construct
  source 1..662: note = Description of Artificial Sequence: Synthetic polypeptide
VPWLMKKPLQLTVLVPLHEYQERLLQQTALPKEQKELLQKLFLKYDALWQHWENQVGHRRIKPHNIATGTLAPRPQKQYPINPKAKPSIQIVIDDLLKQGVLIQQNSTMNTPVYPVPKPDGKWRMVLDYREVNKTIPLIAAQNQHSAGILSSIYRGKYKTTLDLTNGFWAHPITPESYWLTAFTWQGKQYCWTRLPQGFLNSPALFNADVVDLLKEIPNVQAYVDDIYISHDDPQEHLEQLEKIFSILLNAGYVVSLKKSEIAQREVEFLGFNITKEGRGLTDTFKQKLLNITPPKDLKQLQSILGKLNFARNFIPNYSELVKPLYTIVAPANGKFISWTEDNSNQLQHIISVLNQADNLEERNPETRLIIKVNSSPSAGYIRYYNEGSKRPIMYVNYIFSKAEAKFTQTEKLLTTMHKGLIKAMDLAMGQEILVYSPIVSMTKIQRTPLPERKALPVRWITWMTYLEDPRIQFHYDKSLPELQQIPNVTEDVIAKTKHPSEFAMVFYTDGSAIKHPDVNKSHSAGMGIAQVQFIPEYKIVHQWSIPLGDHTAQLAEIAAVEFACKKALKISGPVLIVTDSFYVAESANKELPYWKSNGFLNNKKKPLRHVSKWKSIAECLQLKPDIIIMHEKGHQQPMTTLHTEGNNLADKLATQGSYVVH

SEQ ID NO: 3232 - protein, 751 aa, synthetic construct
  source 1..751: note = Description of Artificial Sequence: Synthetic polypeptide
MDPLQLLQPLEAEIKGTKLKAHWNSGATITCVPEAFLEDERPIQTMLIKTIHGEKQQDVYYLTFKVQGRKVEAEVLASPYDYILLNPSDVPWLMKKPLQLTVLVPLHEYQERLLQQTALPKEQKELLQKLFLKYDALWQHWENQVGHRRIKPHNIATGTLAPRPQKQYPINPKAKPSIQIVIDDLLKQGVLIQQNSTMNTPVYPVPKPDGKWRMVLDYREVNKTIPLIAAQNQHSAGILSSIYRGKYKTTLDLTNGFWAHPITPESYWLTAFTWQGKQYCWTRLPQGFLNSPALFNADVVDLLKEIPNVQAYVDDIYISHDDPQEHLEQLEKIFSILLNAGYVVSLKKSEIAQREVEFLGFNITKEGRGLTDTFKQKLLNITPPKDLKQLQSILGLLNFARNFIPNYSELVKPLYTIVAPANGKFISWTEDNSNQLQHIISVLNQADNLEERNPETRLIIKVNSSPSAGYIRYYNEGSKRPIMYVNYIFSKAEAKFTQTEKLLTTMHKGLIKAMDLAMGQEILVYSPIVSMTKIQRTPLPERKALPVRWITWMTYLEDPRIQFHYDKSLPELQQIPNVTEDVIAKTKHPSEFAMVFYTDGSAIKHPDVNKSHSAGMGIAQVQFIPEYKIVHQWSIPLGDHTAQLAEIAAVEFACKKALKISGPVLIVTDSFYVAESANKELPYWKSNGFLNNKKKPLRHVSKWKSIAECLQLKPDIIIMHEKGHQQPMTTLHTEGNNLADKLATQGSYVVH

SEQ ID NO: 3233 - protein, 751 aa, synthetic construct
  source 1..751: note = Description of Artificial Sequence: Synthetic polypeptide
MDPLQLLQPLEAEIKGTKLKAHWNSGATITCVPEAFLEDERPIQTMLIKTIHGEKQQDVYYLTFKVQGRKVEAEVLASPYDYILLNPSDVPWLMKKPLQLTVLVPLHEYQERLLQQTALPKEQKELLQKLFLKYDALWQHWENQVGHRRIKPHNIATGTLAPRPQKQYPINPKAKPSIQIVIDDLLKQGVLIQQNSTMNTPVYPVPKPDGKWRMVLDYREVNKTIPLIAAQNQHSAGILSSIYRGKYKTTLDLTNGFWAHPITPESYWLTAFTWQGKQYCWTRLPQGFLNSPALFNADVVDLLKEIPNVQAYVDDIYISHDDPQEHLEQLEKIFSILLNAGYVVSLKKSEIAQREVEFLGFNITKEGRGLTDTFKQKLLNITPPKDLKQLQSILGKLNFARNFIPNYSELVKPLYTIVAPANGKFISWTEDNSNQLQHIISVLNQADNLEERNPETRLIIKVNSSPSAGYIRYYNEGSKRPIMYVNYIFSKAEAKFTQTEKLLTTMHKGLIKAMDLAMGQEILVYSPIVSMTKIQRTPLPERKALPVRWITWMTYLEDPRIQFHYDKSLPELQQIPNVTEDVIAKTKHPSEFAMVFYTDGSAIKHPDVNKSHSAGMGIAQVQFIPEYKIVHQWSIPLGDHTAQLAEIAAVEFACKKALKISGPVLIVTDSFYVAESANKELPYWKSNGFLNNKKKPLRHVSKWKSIAECLQLKPDIIIMHEKGHQQPMTTLHTEGNNLADKLATQGSYVVH

SEQ ID NO: 3234 - protein, 751 aa, synthetic construct
  source 1..751: note = Description of Artificial Sequence: Synthetic polypeptide
MDPLQLLQPLEAEIKGTKLKAHWNSGATITCVPQAFLEEEVPIKNIWIKTIHGEKEQPVYYLTFKIQGRKVEAEVISSPYDYILVSPSDIPWLMKKPLQLTTLVPLQEYEERLLKQTMLTGSYKEKLQSLFLKYDALWQHWENQVGHRRIKPHHIATGTVNPRPQKQYPINPKAKASIQTVINDLLKQGVLIQQNSIMNTPVYPVPKPDGKWRMVLDYREVNKTIPLIAAQNQHSAGILSSIFRGKYKTTLDLSNGFWAHSITPESYWLTAFTWLGQQYCWTRLPQGFLNSPALFTADVVDLLKEVPNVQVYVDDIYISHDDPREHLEQLEKVFSLLLNAGYVVSLKKSEIAQHEVEFLGFNITKEGRGLTETFKQKLLNITPPRDLKQLQSILGLLNFARNFIPNFSELVKPLYNIIATANGKYITWTTDNSQQLQNIISMLNSAENLEERNPEVRLIMKVNTSPSAGYIRFYNEFAKRPIMYLNYVYTKAEVKFTNTEKLLTTIHKGLIKALDLGMGQEILVYSPIVSMTKIQKTPLPERKALPIRWITWMSYLEDPRIQFHYDKTLPELQQVPTVTDDIIAKIKHPSEFSMVFYTDGSAIKHPNVNKSHNAGMGIAQVQFKPEFTVINTWSIPLGDHTAQLAEVAAVEFACKKALKIDGPVLIVTDSFYVAESVNKELPYWQSNGFFNNKKKPLKHVSKWKSIADCIQLKPDIIIIHEKGHQPTASTFHTEGNNLADKLATQGSYVVN

SEQ ID NO: 3235 - protein, 662 aa, synthetic construct
  source 1..662: note = Description of Artificial Sequence: Synthetic polypeptide
IPWLMKKPLQLTTLVPLQEYEERLLKQTMLTGSYKEKLQSLFLKYDALWQHWENQVGHRRIKPHHIATGTVNPRPQKQYPINPKAKASIQTVINDLLKQGVLIQQNSIMNTPVYPVPKPDGKWRMVLDYREVNKTIPLIAAQNQHSAGILSSIFRGKYKTTLDLSNGFWAHSITPESYWLTAFTWLGQQYCWTRLPQGFLNSPALFTADVVDLLKEVPNVQVYVDDIYISHDDPREHLEQLEKVFSLLLNAGYVVSLKKSEIAQHEVEFLGFNITKEGRGLTETFKQKLLNITPPRDLKQLQSILGLLNFARNFIPNFSELVKPLYNIIATANGKYITWTTDNSQQLQNIISMLNSAENLEERNPEVRLIMKVNTSPSAGYIRFYNEFAKRPIMYLNYVYTKAEVKFTNTEKLLTTIHKGLIKALDLGMGQEILVYSPIVSMTKIQKTPLPERKALPIRWITWMSYLEDPRIQFHYDKTLPELQQVPTVTDDIIAKIKHPSEFSMVFYTDGSAIKHPNVNKSHNAGMGIAQVQFKPEFTVINTWSIPLGDHTAQLAEVAAVEFACKKALKIDGPVLIVTDSFYVAESVNKELPYWQSNGFFNNKKKPLKHVSKWKSIADCIQLKPDIIIIHEKGHQPTASTFHTEGNNLADKLATQGSYVVN

SEQ ID NO: 3236 - protein, 662 aa, synthetic construct
  source 1..662: note = Description of Artificial Sequence: Synthetic polypeptide
IPWLMKKPLQLTTLVPLQEYEERLLKQTMLTGSYKEKLQSLFLKYDALWQHWENQVGHRRIKPHHIATGTVNPRPQKQYPINPKAKASIQTVINDLLKQGVLIQQNSIMNTPVYPVPKPDGKWRMVLDYREVNKTIPLIAAQNQHSAGILSSIFRGKYKTTLDLSNGFWAHSITPESYWLTAFTWLGQQYCWTRLPQGFLNSPALFNADVVDLLKEVPNVQVYVDDIYISHDDPREHLEQLEKVFSLLLNAGYVVSLKKSEIAQHEVEFLGFNITKEGRGLTETFKQKLLNITPPRDLKQLQSILGLLNFARNFIPNFSELVKPLYNIIATAPGKYITWTTDNSQQLQNIISMLNSAENLEERNPEVRLIMKVNTSPSAGYIRFYNEFAKRPIMYLNYVYTKAEVKFTNTEKLLTTIHKGLIKALDLGMGQEILVYSPIVSMTKIQKTPLPERKALPIRWITWMSYLEDPRIQFHYDKTLPELQQVPTVTDDIIAKIKHPSEFSMVFYTDGSAIKHPNVNKSHNAGMGIAQVQFKPEFTVINTWSIPLGDHTAQLAEVAAVEFACKKALKIDGPVLIVTDSFYVAESVNKELPYWQSNGFFNNKKKPLKHVSKWKSIADCIQLKPDIIIIHEKGHQPTASTFHTEGNNLADKLATQGSYVVN

SEQ ID NO: 3237 - protein, 662 aa, synthetic construct
  source 1..662: note = Description of Artificial Sequence: Synthetic polypeptide
IPWLMKKPLQLTTLVPLQEYEERLLKQTMLTGSYKEKLQSLFLKYDALWQHWENQVGHRRIKPHHIATGTVNPRPQKQYPINPKAKASIQTVINDLLKQGVLIQQNSIMNTPVYPVPKPDGKWRMVLDYREVNKTIPLIAAQNQHSAGILSSIFRGKYKTTLDLSNGFWAHSITPESYWLTAFTWLGQQYCWTRLPQGFLNSPALFNADVVDLLKEVPNVQVYVDDIYISHDDPREHLEQLEKVFSLLLNAGYVVSLKKSEIAQHEVEFLGFNITKEGRGLTETFKQKLLNITPPRDLKQLQSILGKLNFARNFIPNFSELVKPLYNIIATAPGKYITWTTDNSQQLQNIISMLNSAENLEERNPEVRLIMKVNTSPSAGYIRFYNEFAKRPIMYLNYVYTKAEVKFTNTEKLLTTIHKGLIKALDLGMGQEILVYSPIVSMTKIQKTPLPERKALPIRWITWMSYLEDPRIQFHYDKTLPELQQVPTVTDDIIAKIKHPSEFSMVFYTDGSAIKHPNVNKSHNAGMGIAQVQFKPEFTVINTWSIPLGDHTAQLAEVAAVEFACKKALKIDGPVLIVTDSFYVAESVNKELPYWQSNGFFNNKKKPLKHVSKWKSIADCIQLKPDIIIIHEKGHQPTASTFHTEGNNLADKLATQGSYVVN

SEQ ID NO: 3238 - protein, 751 aa, synthetic construct
  source 1..751: note = Description of Artificial Sequence: Synthetic polypeptide
MDPLQLLQPLEAEIKGTKLKAHWNSGATITCVPQAFLEEEVPIKNIWIKTIHGEKEQPVYYLTFKIQGRKVEAEVISSPYDYILVSPSDIPWLMKKPLQLTTLVPLQEYEERLLKQTMLTGSYKEKLQSLFLKYDALWQHWENQVGHRRIKPHHIATGTVNPRPQKQYPINPKAKASIQTVINDLLKQGVLIQQNSIMNTPVYPVPKPDGKWRMVLDYREVNKTIPLIAAQNQHSAGILSSIFRGKYKTTLDLSNGFWAHSITPESYWLTAFTWLGQQYCWTRLPQGFLNSPALFNADVVDLLKEVPNVQVYVDDIYISHDDPREHLEQLEKVFSLLLNAGYVVSLKKSEIAQHEVEFLGFNITKEGRGLTETFKQKLLNITPPRDLKQLQSILGLLNFARNFIPNFSELVKPLYNIIATAPGKYITWTTDNSQQLQNIISMLNSAENLEERNPEVRLIMKVNTSPSAGYIRFYNEFAKRPIMYLNYVYTKAEVKFTNTEKLLTTIHKGLIKALDLGMGQEILVYSPIVSMTKIQKTPLPERKALPIRWITWMSYLEDPRIQFHYDKTLPELQQVPTVTDDIIAKIKHPSEFSMVFYTDGSAIKHPNVNKSHNAGMGIAQVQFKPEFTVINTWSIPLGDHTAQLAEVAAVEFACKKALKIDGPVLIVTDSFYVAESVNKELPYWQSNGFFNNKKKPLKHVSKWKSIADCIQLKPDIIIIHEKGHQPTASTFHTEGNNLADKLATQGSYVVN

SEQ ID NO: 3239 - protein, 751 aa, synthetic construct
  source 1..751: note = Description of Artificial Sequence: Synthetic polypeptide
MDPLQLLQPLEAEIKGTKLKAHWNSGATITCVPQAFLEEEVPIKNIWIKTIHGEKEQPVYYLTFKIQGRKVEAEVISSPYDYILVSPSDIPWLMKKPLQLTTLVPLQEYEERLLKQTMLTGSYKEKLQSLFLKYDALWQHWENQVGHRRIKPHHIATGTVNPRPQKQYPINPKAKASIQTVINDLLKQGVLIQQNSIMNTPVYPVPKPDGKWRMVLDYREVNKTIPLIAAQNQHSAGILSSIFRGKYKTTLDLSNGFWAHSITPESYWLTAFTWLGQQYCWTRLPQGFLNSPALFNADVVDLLKEVPNVQVYVDDIYISHDDPREHLEQLEKVFSLLLNAGYVVSLKKSEIAQHEVEFLGFNITKEGRGLTETFKQKLLNITPPRDLKQLQSILGKLNFARNFIPNFSELVKPLYNIIATAPGKYITWTTDNSQQLQNIISMLNSAENLEERNPEVRLIMKVNTSPSAGYIRFYNEFAKRPIMYLNYVYTKAEVKFTNTEKLLTTIHKGLIKALDLGMGQEILVYSPIVSMTKIQKTPLPERKALPIRWITWMSYLEDPRIQFHYDKTLPELQQVPTVTDDIIAKIKHPSEFSMVFYTDGSAIKHPNVNKSHNAGMGIAQVQFKPEFTVINTWSIPLGDHTAQLAEVAAVEFACKKALKIDGPVLIVTDSFYVAESVNKELPYWQSNGFFNNKKKPLKHVSKWKSIADCIQLKPDIIIIHEKGHQPTASTFHTEGNNLADKLATQGSYVVN

SEQ ID NO: 3240 - protein, 751 aa, synthetic construct
  source 1..751: note = Description of Artificial Sequence: Synthetic polypeptide
MNPLQLLQPLPAEVKGTKLLAHWNSGATITCIPESFLEDEQPIKQTLIKTIHGEKQQNVYYLTFKVKGRKVEAEVIASPYEYILLSPTDVPWLTQQPLQLTILVPLQEYQDRILNKTALPEEQKQQLKALFTKYDNLWQHWENQVGHRKIRPHNIATGDYPPRPQKQYPINPKAKPSIQIVIDDLLKQGVLTPQNSTMNTPVYPVPKPDGRWRMVLDYREVNKTIPLTAAQNQHSAGILATIVRQKYKTTLDLANGFWAHPITPDSYWLTAFTWQGKQYCWTRLPQGFLNSPALFTADAVDLLKEVPNVQVYVDDIYLSHDNPHEHIQQLEKVFQILLQAGYVVSLKKSEIGQRTVEFLGFNITKEGRGLTDTFKTKLLNVTPPKDLKQLQSILGLLNFARNFIPNFAELVQTLYNLIASSKGKYIEWTEDNTKQLNKVIEALNTASNLEERLPDQRLVIKVNTSPSAGYVRYYNESGKKPIMYLNYVFSKAELKFSMLEKLLTTMHKALIKAMDLAMGQEILVYSPIVSMTKIQKTPLPERKALPIRWITWMTYLEDPRIQFHYDKTLPELKHIPDVYTSSIPPLKHPSQYEGVFCTDGSAIKSPDPTKSNNAGMGIVHAIYNPEYKILNQWSIPLGHHTAQMAEIAAVEFACKKALKVPGPVLVITDSFYVAESANKELPYWKSNGFVNNKKEPLKHISKWKSIAECLSIKPDITIQHEKGHQPINTSIHTEGNALADKLATQGSYVVN

SEQ ID NO: 3241 - protein, 662 aa, synthetic construct
  source 1..662: note = Description of Artificial Sequence: Synthetic polypeptide
VPWLTQQPLQLTILVPLQEYQDRILNKTALPEEQKQQLKALFTKYDNLWQHWENQVGHRKIRPHNIATGDYPPRPQKQYPINPKAKPSIQIVIDDLLKQGVLTPQNSTMNTPVYPVPKPDGRWRMVLDYREVNKTIPLTAAQNQHSAGILATIVRQKYKTTLDLANGFWAHPITPDSYWLTAFTWQGKQYCWTRLPQGFLNSPALFTADAVDLLKEVPNVQVYVDDIYLSHDNPHEHIQQLEKVFQILLQAGYVVSLKKSEIGQRTVEFLGFNITKEGRGLTDTFKTKLLNVTPPKDLKQLQSILGLLNFARNFIPNFAELVQTLYNLIASSKGKYIEWTEDNTKQLNKVIEALNTASNLEERLPDQRLVIKVNTSPSAGYVRYYNESGKKPIMYLNYVFSKAELKFSMLEKLLTTMHKALIKAMDLAMGQEILVYSPIVSMTKIQKTPLPERKALPIRWITWMTYLEDPRIQFHYDKTLPELKHIPDVYTSSIPPLKHPSQYEGVFCTDGSAIKSPDPTKSNNAGMGIVHAIYNPEYKILNQWSIPLGHHTAQMAEIAAVEFACKKALKVPGPVLVITDSFYVAESANKELPYWKSNGFVNNKKEPLKHISKWKSIAECLSIKPDITIQHEKGHQPINTSIHTEGNALADKLATQGSYVVN

SEQ ID NO: 3242 - protein, 662 aa, synthetic construct
  source 1..662: note = Description of Artificial Sequence: Synthetic polypeptide
VPWLTQQPLQLTILVPLQEYQDRILNKTALPEEQKQQLKALFTKYDNLWQHWENQVGHRKIRPHNIATGDYPPRPQKQYPINPKAKPSIQIVIDDLLKQGVLTPQNSTMNTPVYPVPKPDGRWRMVLDYREVNKTIPLTAAQNQHSAGILATIVRQKYKTTLDLANGFWAHPITPDSYWLTAFTWQGKQYCWTRLPQGFLNSPALFNADAVDLLKEVPNVQVYVDDIYLSHDNPHEHIQQLEKVFQILLQAGYVVSLKKSEIGQRTVEFLGFNITKEGRGLTDTFKTKLLNVTPPKDLKQLQSILGLLNFARNFIPNFAELVQTLYNLIASSPGKYIEWTEDNTKQLNKVIEALNTASNLEERLPDQRLVIKVNTSPSAGYVRYYNESGKKPIMYLNYVFSKAELKFSMLEKLLTTMHKALIKAMDLAMGQEILVYSPIVSMTKIQKTPLPERKALPIRWITWMTYLEDPRIQFHYDKTLPELKHIPDVYTSSIPPLKHPSQYEGVFCTDGSAIKSPDPTKSNNAGMGIVHAIYNPEYKILNQWSIPLGHHTAQMAEIAAVEFACKKALKVPGPVLVITDSFYVAESANKELPYWKSNGFVNNKKEPLKHISKWKSIAECLSIKPDITIQHEKGHQPINTSIHTEGNALADKLATQGSYVVN

SEQ ID NO: 3243 - protein, 662 aa, synthetic construct
  source 1..662: note = Description of Artificial Sequence: Synthetic polypeptide
VPWLTQQPLQLTILVPLQEYQDRILNKTALPEEQKQQLKALFTKYDNLWQHWENQVGHRKIRPHNIATGDYPPRPQKQYPINPKAKPSIQIVIDDLLKQGVLTPQNSTMNTPVYPVPKPDGRWRMVLDYREVNKTIPLTAAQNQHSAGILATIVRQKYKTTLDLANGFWAHPITPDSYWLTAFTWQGKQYCWTRLPQGFLNSPALFNADAVDLLKEVPNVQVYVDDIYLSHDNPHEHIQQLEKVFQILLQAGYVVSLKKSEIGQRTVEFLGFNITKEGRGLTDTFKTKLLNVTPPKDLKQLQSILGKLNFARNFIPNFAELVQTLYNLIASSPGKYIEWTEDNTKQLNKVIEALNTASNLEERLPDQRLVIKVNTSPSAGYVRYYNESGKKPIMYLNYVFSKAELKFSMLEKLLTTMHKALIKAMDLAMGQEILVYSPIVSMTKIQKTPLPERKALPIRWITWMTYLEDPRIQFHYDKTLPELKHIPDVYTSSIPPLKHPSQYEGVFCTDGSAIKSPDPTKSNNAGMGIVHAIYNPEYKILNQWSIPLGHHTAQMAEIAAVEFACKKALKVPGPVLVITDSFYVAESANKELPYWKSNGFVNNKKEPLKHISKWKSIAECLSIKPDITIQHEKGHQPINTSIHTEGNALADKLATQGSYVVN

SEQ ID NO: 3244 - protein, 751 aa, synthetic construct
  source 1..751: note = Description of Artificial Sequence: Synthetic polypeptide
MNPLQLLQPLPAEVKGTKLLAHWNSGATITCIPESFLEDEQPIKQTLIKTIHGEKQQNVYYLTFKVKGRKVEAEVIASPYEYILLSPTDVPWLTQQPLQLTILVPLQEYQDRILNKTALPEEQKQQLKALFTKYDNLWQHWENQVGHRKIRPHNIATGDYPPRPQKQYPINPKAKPSIQIVIDDLLKQGVLTPQNSTMNTPVYPVPKPDGRWRMVLDYREVNKTIPLTAAQNQHSAGILATIVRQKYKTTLDLANGFWAHPITPDSYWLTAFTWQGKQYCWTRLPQGFLNSPALFNADAVDLLKEVPNVQVYVDDIYLSHDNPHEHIQQLEKVFQILLQAGYVVSLKKSEIGQRTVEFLGFNITKEGRGLTDTFKTKLLNVTPPKDLKQLQSILGLLNFARNFIPNFAELVQTLYNLIASSPGKYIEWTEDNTKQLNKVIEALNTASNLEERLPDQRLVIKVNTSPSAGYVRYYNESGKKPIMYLNYVFSKAELKFSMLEKLLTTMHKALIKAMDLAMGQEILVYSPIVSMTKIQKTPLPERKALPIRWITWMTYLEDPRIQFHYDKTLPELKHIPDVYTSSIPPLKHPSQYEGVFCTDGSAIKSPDPTKSNNAGMGIVHAIYNPEYKILNQWSIPLGHHTAQMAEIAAVEFACKKALKVPGPVLVITDSFYVAESANKELPYWKSNGFVNNKKEPLKHISKWKSIAECLSIKPDITIQHEKGHQPINTSIHTEGNALADKLATQGSYVVN

SEQ ID NO: 3245 - protein, 751 aa, synthetic construct
  source 1..751: note = Description of Artificial Sequence: Synthetic polypeptide
MNPLQLLQPLPAEVKGTKLLAHWNSGATITCIPESFLEDEQPIKQTLIKTIHGEKQQNVYYLTFKVKGRKVEAEVIASPYEYILLSPTDVPWLTQQPLQLTILVPLQEYQDRILNKTALPEEQKQQLKALFTKYDNLWQHWENQVGHRKIRPHNIATGDYPPRPQKQYPINPKAKPSIQIVIDDLLKQGVLTPQNSTMNTPVYPVPKPDGRWRMVLDYREVNKTIPLTAAQNQHSAGILATIVRQKYKTTLDLANGFWAHPITPDSYWLTAFTWQGKQYCWTRLPQGFLNSPALFNADAVDLLKEVPNVQVYVDDIYLSHDNPHEHIQQLEKVFQILLQAGYVVSLKKSEIGQRTVEFLGFNITKEGRGLTDTFKTKLLNVTPPKDLKQLQSILGKLNFARNFIPNFAELVQTLYNLIASSPGKYIEWTEDNTKQLNKVIEALNTASNLEERLPDQRLVIKVNTSPSAGYVRYYNESGKKPIMYLNYVFSKAELKFSMLEKLLTTMHKALIKAMDLAMGQEILVYSPIVSMTKIQKTPLPERKALPIRWITWMTYLEDPRIQFHYDKTLPELKHIPDVYTSSIPPLKHPSQYEGVFCTDGSAIKSPDPTKSNNAGMGIVHAIYNPEYKILNQWSIPLGHHTAQMAEIAAVEFACKKALKVPGPVLVITDSFYVAESANKELPYWKSNGFVNNKKEPLKHISKWKSIAECLSIKPDITIQHEKGHQPINTSIHTEGNALADKLATQGSYVVN

SEQ ID NO: 3246 - protein, 592 aa, synthetic construct
  source 1..592: note = Description of Artificial Sequence: Synthetic polypeptide
PRSRAIDIPVPHADKISWKITDPVWVDQWPLTYEKTLAAIALVQEQLAAGHIEPTNSPWNTPIFIIKKKSGSWRLLQDLRAVNKVMVPMGALQPGLPSPVAIPLNYHKIVIDLKDCFFTIPLHPEDRPYFAFSVPQINFQSPMPRYQWKVLPQGMANSPTLCQKFVAAAIAPVRSQWPEAYILHYMDDILLACDSAEAAKACYAHIISCLTSYGLKIAPDKVQVSEPFSYLGFELHHQQVFTPRVCLKTDHLKTLNDFQKLLGDIQWLRPYLKLPTSALVPLNNILKGDPNPLSVRALTPEAKQSLALINKAIQNQSVQQISYNLPLVLLLLPTPHTPTAVFWQPNGTDPTKNGSPLLWLHLPASPSKVLLTYPSLLAMLIIKGRYTGRQLFGRDPHSIIIPYTQDQLTWLLQTSDEWAIALSSFTGDIDNHYPSDPVIQFAKLHQFIFPKITKCAPIPQATLVFTDGSSNGIAAYVIDNQPISIKSPYLSAQLVELYAILQVFTVLAHQPFNLYTDSAYIAQSVPLLETVPFIKSSTNATPLFSKLQQLILNRQHPFFIGHLRAHLNLPGPLAEGNALADAATQIFPIISD

SEQ ID NO: 3247 - protein, 592 aa, synthetic construct
  source 1..592: note = Description of Artificial Sequence: Synthetic polypeptide
PRSRAIDIPVPHADKISWKITDPVWVDQWPLTYEKTLAAIALVQEQLAAGHIEPTNSPWNTPIFIIKKKSGSWRLLQDLRAVNKVMVPMGALQPGLPSPVAIPLNYHKIVIDLKDCFFTIPLHPEDRPYFAFSVPQINFQSPMPRYQWKVLPQGMANSPTLCQKFVAAAIAPVRSQWPEAYILHYMDDILLACDSAEAAKACYAHIISCLTSYGLKIAPDKVQVSEPFSYLGFELHHQQVFTPRVCLKTDHLKTLNDFQKLLGDIQWLRPYLKLPTSALVPLNNILKPDPNPLSVRALTPEAKQSLALINKAIQNQSVQQISYNLPLVLLLLPTPHTPTAVFWQPNGTDPTKNGSPLLWLHLPASPSKVLLTYPSLLAMLIIKGRYTGRQLFGRDPHSIIIPYTQDQLTWLLQTSDEWAIALSSFTGDIDNHYPSDPVIQFAKLHQFIFPKITKCAPIPQATLVFTDGSSNGIAAYVIDNQPISIKSPYLSAQLVELYAILQVFTVLAHQPFNLYTDSAYIAQSVPLLETVPFIKSSTNATPLFSKLQQLILNRQHPFFIGHLRAHLNLPGPLAEGNALADAATQIFPIISD

SEQ ID NO: 3248 - protein, 592 aa, synthetic construct
  source 1..592: note = Description of Artificial Sequence: Synthetic polypeptide
PRSRAIDIPVPHADKISWKITDPVWVDQWPLTYEKTLAAIALVQEQLAAGHIEPTNSPWNTPIFIIKKKSGSWRLLQDLRAVNKVMVPMGALQPGLPSPVAPPLNYHKIVIDLKDCFFTIPLHPEDRPYFAFSVPQINFQSPMPRYQWKVLPQGMANSPTLCQKFVAAAIAPVRSQWPEAYILHYMDDILLACDSAEAAKACYAHIISCLTSYGLKIAPDKVQVSEPFSYLGFELHHQQVFTPRVCLKTDHLKTLNDFQKLLGDIQWLRPYLKLPTSALVPLNNILKPDPNPLSVRALTPEAKQSLALINKAIQNQSVQQISYNLPLVLLLLPTPHTPTAVFWQPNGTDPTKNGSPLLWLHLPASPSKVLLTYPSLLAMLIIKGRYTGRQLFGRDPHSIIIPYTQDQLTWLLQTSDEWAIALSSFTGDIDNHYPSDPVIQFAKLHQFIFPKITKCAPIPQATLVFTDGSSNGIAAYVIDNQPISIKSPYLSAQLVELYAILQVFTVLAHQPFNLYTDSAYIAQSVPLLETVPFIKSSTNATPLFSKLQQLILNRQHPFFIGHLRAHLNLPGPLAEGNALADAATQIFPIISD

SEQ ID NO: 3249 - protein, 585 aa, synthetic construct
  source 1..585: note = Description of Artificial Sequence: Synthetic polypeptide
LTAAIDMLAPQQCAEPITWKSDEPVWVDQWPLTSEKLAAAQQLVQEQLEAGHITESNSPWNTPIFVIKKKSGKWRLLQDLRAVNATMVLMGALQPGLPSPVAIPQGYLKIIIDLKDCFFSIPLHPSDQKRFAFSLPSTNFKEPMQRFQWKVLPQRMANSPTLCQKYVATAIHKVRHAWKQMYIIHYMDDILIAGKDGQQVLQCFDQLKQELTIAGLHIAPEKIQLQDPYTYLGFELNGPKITNQKAVIRKDKLQTLNDFQKLLGDINWLRPYLKLTTADLKPLFDTLKGDSNPNSHRSLSKEALALLDKVETAIAEQFVTHINYSLPLMFLIFNTALTPTGLFWQNNPIMWVHLPASPKKVLLPYYDAIADLIILGRDHSKKYFGIEPSVIIQPYSKSQIDWLMQNTEMWPIACASYVGILDNHYPPNKLIQFCKLHAFIFPQIISKTPLNNALLVFTDGSSTGMAAYTLADTTIKFQTNLNSAQLVELQALIAVLSAFPNQPLNIYTDSAYLAHSIPLLETVAQIKHISETAKLFLQCQQLIYNRSIPFYIGHVRAHSGLPGPIAHGNQKADLATKTVASNINT

SEQ ID NO: 3250 - protein, 585 aa, synthetic construct
  source 1..585: note = Description of Artificial Sequence: Synthetic polypeptide
LTAAIDMLAPQQCAEPITWKSDEPVWVDQWPLTSEKLAAAQQLVQEQLEAGHITESNSPWNTPIFVIKKKSGKWRLLQDLRAVNATMVLMGALQPGLPSPVAPPQGYLKIIIDLKDCFFSIPLHPSDQKRFAFSLPSTNFKEPMQRFQWKVLPQRMANSPTLCQKYVATAIHKVRHAWKQMYIIHYMDDILIAGKDGQQVLQCFDQLKQELTIAGLHIAPEKIQLQDPYTYLGFELNGPKITNQKAVIRKDKLQTLNDFQKLLGDINWLRPYLKLTTADLKPLFDTLKGDSNPNSHRSLSKEALALLDKVETAIAEQFVTHINYSLPLMFLIFNTALTPTGLFWQNNPIMWVHLPASPKKVLLPYYDAIADLIILGRDHSKKYFGIEPSVIIQPYSKSQIDWLMQNTEMWPIACASYVGILDNHYPPNKLIQFCKLHAFIFPQIISKTPLNNALLVFTDGSSTGMAAYTLADTTIKFQTNLNSAQLVELQALIAVLSAFPNQPLNIYTDSAYLAHSIPLLETVAQIKHISETAKLFLQCQQLIYNRSIPFYIGHVRAHSGLPGPIAHGNQKADLATKTVASNINT

SEQ ID NO: 3251 - protein, 585 aa, synthetic construct
  source 1..585: note = Description of Artificial Sequence: Synthetic polypeptide
LATAVDILAPQRYADPITWKSDEPVWVDQWPLTQEKLAAAQQLVQEQLQAGHIIESNSPWNTPIFVIKKKSGKWRLLQDLRAVNATMVLMGALQPGLPSPVAIPQGYFKIVIDLKDCFFTIPLQPVDQKRFAFSLPSTNFKQPMKRYQWKVLPQGMANSPTLCQKYVAAAIEPVRKSWAQMYIIHYMDDILIAGKLGEQVLQCFAQLKQALTTTGLQIAPEKVQLQDPYTYLGFQINGPKITNQKAVIRRDKLQTLNDFQKLLGDINWLRPYLHLTTGDLKPLFDILKGDSNPNSPRSLSEAALASLQKVETAIAEQFVTQIDYTQPLTFLIFNTTLTPTGLFWQNNPVMWVHLPASPKKVLLPYYDAIADLIILGRDNSKKYFGLEPSTIIQPYSKSQIHWLMQNTETWPIACASYAGNIDNHYPPNKLIQFCKLHAVVFPRIISKTPLDNALLVFTDGSSTGIAAYTFEKTTVRFKTSHTSAQLVELQALIAVLSAFPHRALNVYTDSAYLAHSIPLLETVSHIKHISDTAKFFLQCQQLIYNRSIPFYLGHIRAHSGLPGPLSQGNHITDLATKVVATTLTT

SEQ ID NO: 3252 - protein, 585 aa, synthetic construct
  source 1..585: note = Description of Artificial Sequence: Synthetic polypeptide
LATAVDILAPQRYADPITWKSDEPVWVDQWPLTQEKLAAAQQLVQEQLQAGHIIESNSPWNTPIFVIKKKSGKWRLLQDLRAVNATMVLMGALQPGLPSPVAPPQGYFKIVIDLKDCFFTIPLQPVDQKRFAFSLPSTNFKQPMKRYQWKVLPQGMANSPTLCQKYVAAAIEPVRKSWAQMYIIHYMDDILIAGKLGEQVLQCFAQLKQALTTTGLQIAPEKVQLQDPYTYLGFQINGPKITNQKAVIRRDKLQTLNDFQKLLGDINWLRPYLHLTTGDLKPLFDILKGDSNPNSPRSLSEAALASLQKVETAIAEQFVTQIDYTQPLTFLIFNTTLTPTGLFWQNNPVMWVHLPASPKKVLLPYYDAIADLIILGRDNSKKYFGLEPSTIIQPYSKSQIHWLMQNTETWPIACASYAGNIDNHYPPNKLIQFCKLHAVVFPRIISKTPLDNALLVFTDGSSTGIAAYTFEKTTVRFKTSHTSAQLVELQALIAVLSAFPHRALNVYTDSAYLAHSIPLLETVSHIKHISDTAKFFLQCQQLIYNRSIPFYLGHIRAHSGLPGPLSQGNHITDLATKVVATTLTT

SEQ ID NO: 3253 - protein, 650 aa, synthetic construct
  source 1..650: note = Description of Artificial Sequence: Synthetic polypeptide
SCQTKNTLNIDEYLLQFPDQLWASLPTDIGRMLVPPITIKIKDNASLPSIRQYPLPKDKTEGLRPLISSLENQGILIKCHSPCNTPIFPIKKAGRDEYRMIHDLRAINNIVAPLTAVVASPTTVLSNLAPSLHWFTVIDLSNAFFSVPIHKDSQYLFAFTFEGHQYTWTVLPQGFIHSPTLFSQALYQSLHKIKFKISSEICIYMDDVLIASKDRDTNLKDTAVMLQHLASEGHKVSKKKLQLCQQEVVYLGQLLTPEGRKILPDRKVTVSQFQQPTTIRQIRAFLGLVGYCRHWIPEFSIHSKFLEKQLKKDTAEPFQLDDQQVEAFNKLKHAITTAPVLVVPDPAKPFQLYTSHSEHASIAVLTQKHAGRTRPIAFLSSKFDAIESGLPPCLKACASIHRSLTQADSFILGAPLIIYTTHAICTLLQRDRSQLVTASRFSKWEADLLRPELTFVACSAVSPAHLYMQSCENNIPPHDCVLLTHTISRPRPDLSDLPIPDPDMTLFSDGSYTTGRGGAAVVMHRPVTDDFIIIHQQPGGASAQTAELLALAAACHLATDKTVNIYTDSRYAYGVVHDFGHLWMHRGFVTSAGTPIKNHKEIEYLLKQIMKPKQVSVIKIEAHTKGVSMEVRGNAAADEAAKNAVFLVQR

SEQ ID NO: 3254 - protein, 650 aa, synthetic construct
  source 1..650: note = Description of Artificial Sequence: Synthetic polypeptide
SCQTKNTLNIDEYLLQFPDQLWASLPTDIGRMLVPPITIKIKDNASLPSIRQYPLPKDKTEGLRPLISSLENQGILIKCHSPCNTPIFPIKKAGRDEYRMIHDLRAINNIVAPLTAVVASPTTVLSNLAPSLHWFTVIDLSNAFFSVPIHKDSQYLFAFTFEGHQYTWTVLPQGFIHSPTLFNQALYQSLHKIKFKISSEICIYMDDVLIASKDRDTNLKDTAVMLQHLASEGHKVSKKKLQLCQQEVVYLGQLLTPEGRKILPDRKVTVSQFQQPTTIRQIRAFLGLVGYCRHWIPEFSIHSKFLEKQLKPDTAEPFQLDDQQVEAFNKLKHAITTAPVLVVPDPAKPFQLYTSHSEHASIAVLTQKHAGRTRPIAFLSSKFDAIESGLPPCLKACASIHRSLTQADSFILGAPLIIYTTHAICTLLQRDRSQLVTASRFSKWEADLLRPELTFVACSAVSPAHLYMQSCENNIPPHDCVLLTHTISRPRPDLSDLPIPDPDMTLFSDGSYTTGRGGAAVVMHRPVTDDFIIIHQQPGGASAQTAELLALAAACHLATDKTVNIYTDSRYAYGVVHDFGHLWMHRGFVTSAGTPIKNHKEIEYLLKQIMKPKQVSVIKIEAHTKGVSMEVRGNAAADEAAKNAVFLVQR

SEQ ID NO: 3255 - protein, 650 aa, synthetic construct
  source 1..650: note = Description of Artificial Sequence: Synthetic polypeptide
SCQTKNTLNIDEYLLQFPDQLWASLPTDIGRMLVPPITIKIKDNASLPSIRQYPLPKDKTEGLRPLISSLENQGILIKCHSPCNTPIFPIKKAGRDEYRMIHDLRAINNIVAPLTAVVASPTTVLSNLAPSLHWFTVIDLSNAFFSVPIHKDSQYLFAFTFEGHQYTWTVLPQGFIHSPTLFNQALYQSLHKIKFKISSEICIYMDDVLIASKDRDTNLKDTAVMLQHLASEGHKVSKKKLQLCQQEVVYLGQLLTPEGRKILPDRKVTVSQFQQPTTIRQIRAFLGKVGYCRHFIPEFSIHSKFLEKQLKPDTAEPFQLDDQQVEAFNKLKHAITTAPVLVVPDPAKPFQLYTSHSEHASIAVLTQKHAGRTRPIAFLSSKFDAIESGLPPCLKACASIHRSLTQADSFILGAPLIIYTTHAICTLLQRDRSQLVTASRFSKWEADLLRPELTFVACSAVSPAHLYMQSCENNIPPHDCVLLTHTISRPRPDLSDLPIPDPDMTLFSDGSYTTGRGGAAVVMHRPVTDDFIIIHQQPGGASAQTAELLALAAACHLATDKTVNIYTDSRYAYGVVHDFGHLWMHRGFVTSAGTPIKNHKEIEYLLKQIMKPKQVSVIKIEAHTKGVSMEVRGNAAADEAAKNAVFLVQR

SEQ ID NO: 3256 - protein, 669 aa, synthetic construct
  source 1..669: note = Description of Artificial Sequence: Synthetic polypeptide
VLNLEEEYRLHEKPVPSSIDPSWLQLFPTVWAERAGMGLANQVPPVVVELRSGASPVAVRQYPMSKEAREGIRPHIQRFLDLGVLVPCQSPWNTPLLPVKKPGTNDYRPVQDLREINKRVQDIHPTVPNPYNLLSSLPPSHTWYSVLDLKDAFFCLKLHPNSQPLFAFEWRDPEKGNTGQLTWTRLPQGFKNSPTLFDEALHRDLAPFRALNPQVVLLQYVDDLLVAAPTYRDCKEGTQKLLQELSKLGYRVSAKKAQLCQKEVTYLGYLLKEGKRWLTPARKATVMKIPPPTTPRQVREFLGTAGFCRLWIPGFASLAAPLYPLTKESIPFIWTEEHQKAFDRIKEALLSAPALALPDLTKPFTLYVDERAGVARGVLTQTLGPWRRPVAYLSKKLDPVASGWPTCLKAVAAVALLLKDADKLTLGQNVTVIASHSLESIVRQPPDRWMTNARMTHYQSLLLNERVSFAPPAVLNPATLLPVESEATPVHRCSEILAEETGTRRDLKDQPLPGVPAWYTDGSSFIAEGKRRAGAAIVDGKRTVWASSLPEGTSAQKAELVALTQALRLAEGKDINIYTDSRYAFATAHIHGAIYKQRGLLTSAGKDIKNKEEILALLEAIHLPKRVAIIHCPGHQKGNDPVATGNRRADEAAKQAALSTRVLAETTKP

SEQ ID NO: 3257 - protein, 669 aa, synthetic construct
  source 1..669: note = Description of Artificial Sequence: Synthetic polypeptide
VLNLEEEYRLHEKPVPSSIDPSWLQLFPTVWAERAGMGLANQVPPVVVELRSGASPVAVRQYPMSKEAREGIRPHIQRFLDLGVLVPCQSPWNTPLLPVKKPGTNDYRPVQDLREINKRVQDIHPTVPNPYNLLSSLPPSHTWYSVLDLKDAFFCLKLHPNSQPLFAFEWRDPEKGNTGQLTWTRLPQGFKNSPTLFNEALHRDLAPFRALNPQVVLLQYVDDLLVAAPTYRDCKEGTQKLLQELSKLGYRVSAKKAQLCQKEVTYLGYLLKEGKRWLTPARKATVMKIPPPTTPRQVREFLGTAGFCRLWIPGFASLAAPLYPLTKPSIPFIWTEEHQKAFDRIKEALLSAPALALPDLTKPFTLYVDERAGVARGVLTQTLGPWRRPVAYLSKKLDPVASGWPTCLKAVAAVALLLKDADKLTLGQNVTVIASHSLESIVRQPPDRWMTNARMTHYQSLLLNERVSFAPPAVLNPATLLPVESEATPVHRCSEILAEETGTRRDLKDQPLPGVPAWYTDGSSFIAEGKRRAGAAIVDGKRTVWASSLPEGTSAQKAELVALTQALRLAEGKDINIYTDSRYAFATAHIHGAIYKQRGWLTSAGKDIKNKEEILALLEAIHLPKRVAIIHCPGHQKGNDPVATGNRRADEAAKQAALSTRVLAETTKP

SEQ ID NO: 3258 - protein, 669 aa, synthetic construct
  source 1..669: note = Description of Artificial Sequence: Synthetic polypeptide
VLNLEEEYRLHEKPVPSSIDPSWLQLFPTVWAERAGMGLANQVPPVVVELRSGASPVAVRQYPMSKEAREGIRPHIQRFLDLGVLVPCQSPWNTPLLPVKKPGTNDYRPVQDLREINKRVQDIHPTVPNPYNLLSSLPPSHTWYSVLDLKDAFFCLKLHPNSQPLFAFEWRDPEKGNTGQLTWTRLPQGFKNSPTLFNEALHRDLAPFRALNPQVVLLQYVDDLLVAAPTYRDCKEGTQKLLQELSKLGYRVSAKKAQLCQKEVTYLGYLLKEGKRWLTPARKATVMKIPPPTTPRQVREFLGKAGFCRLFIPGFASLAAPLYPLTKPSIPFIWTEEHQKAFDRIKEALLSAPALALPDLTKPFTLYVDERAGVARGVLTQTLGPWRRPVAYLSKKLDPVASGWPTCLKAVAAVALLLKDADKLTLGQNVTVIASHSLESIVRQPPDRWMTNARMTHYQSLLLNERVSFAPPAVLNPATLLPVESEATPVHRCSEILAEETGTRRDLKDQPLPGVPAWYTDGSSFIAEGKRRAGAAIVDGKRTVWASSLPEGTSAQKAELVALTQALRLAEGKDINIYTDSRYAFATAHIHGAIYKQRGWLTSAGKDIKNKEEILALLEAIHLPKRVAIIHCPGHQKGNDPVATGNRRADEAAKQAALSTRVLAETTKP

SEQ ID NO: 3259 - protein, 671 aa, synthetic construct
  source 1..671: note = Description of Artificial Sequence: Synthetic polypeptide
TLNIEDEYRLHETSKEPDVPLGSTWLSDFPQAWAETGGMGLAVRQAPLIIPLKATSTPVSIKQYPMSQEARLGIKPHIQRLLDQGILVPCQSPWNTPLLPVKKPGTNDYRPVQDLREVNKRVEDIHPTVPNPYNLLSGLPPSHQWYTVLDLKDAFFCLRLHPTSQPLFAFEWRDPEMGISGQLTWTRLPQGFKNSPTLFDEALHRDLADFRIQHPDLILLQYVDDLLLAATSEQDCQRGTRALLQTLGNLGYRASAKKAQICQKQVKYLGYLLKEGQRWLTEARKETVMGQPTPKTPRQLREFLGTAGFCRLWIPGFAEMAAPLYPLTKTGTLFNWGPDQQKAYQEIKQALLTAPALGLPDLTKPFELFVDEKQGYAKGVLTQKLGPWRRPVAYLSKKLDPVAAGWPPCLRMVAAIAVLTKDAGKLTMGQPLVILAPHAVEALVKQPPDRWLSNARMTHYQAMLLDTDRVQFGPVVALNPATLLPLPEKEAPHDCLEILAETHGTRPDLTDQPIPDADYTWYTDGSSFLQEGQRRAGAAVTTETEVIWARALPAGTSAQRAELIALTQALKMAEGKKLNVYTDSRYAFATAHVHGEIYRRRGLLTSEGREIKNKNEILALLKALFLPKRLSIIHCPGHQKGNSAEARGNRMADQAAREAAMKAVLETSTLL

SEQ ID NO: 3260 - protein, 671 aa, synthetic construct
  source 1..671: note = Description of Artificial Sequence: Synthetic polypeptide
TLNIEDEYRLHETSKEPDVPLGSTWLSDFPQAWAETGGMGLAVRQAPLIIPLKATSTPVSIKQYPMSQEARLGIKPHIQRLLDQGILVPCQSPWNTPLLPVKKPGTNDYRPVQDLREVNKRVEDIHPTVPNPYNLLSGLPPSHQWYTVLDLKDAFFCLRLHPTSQPLFAFEWRDPEMGISGQLTWTRLPQGFKNSPTLFNEALHRDLADFRIQHPDLILLQYVDDLLLAATSEQDCQRGTRALLQTLGNLGYRASAKKAQICQKQVKYLGYLLKEGQRWLTEARKETVMGQPTPKTPRQLREFLGTAGFCRLWIPGFAEMAAPLYPLTKPGTLFNWGPDQQKAYQEIKQALLTAPALGLPDLTKPFELFVDEKQGYAKGVLTQKLGPWRRPVAYLSKKLDPVAAGWPPCLRMVAAIAVLTKDAGKLTMGQPLVILAPHAVEALVKQPPDRWLSNARMTHYQAMLLDTDRVQFGPVVALNPATLLPLPEKEAPHDCLEILAETHGTRPDLTDQPIPDADYTWYTDGSSFLQEGQRRAGAAVTTETEVIWARALPAGTSAQRAELIALTQALKMAEGKKLNVYTDSRYAFATAHVHGEIYRRRGWLTSEGREIKNKNEILALLKALFLPKRLSIIHCPGHQKGNSAEARGNRMADQAAREAAMKAVLETSTLL

SEQ ID NO: 3261 - protein, 671 aa, synthetic construct
  source 1..671: note = Description of Artificial Sequence: Synthetic polypeptide
TLNIEDEYRLHETSKEPDVPLGSTWLSDFPQAWAETGGMGLAVRQAPLIIPLKATSTPVSIKQYPMSQEARLGIKPHIQRLLDQGILVPCQSPWNTPLLPVKKPGTNDYRPVQDLREVNKRVEDIHPTVPNPYNLLSGLPPSHQWYTVLDLKDAFFCLRLHPTSQPLFAFEWRDPEMGISGQLTWTRLPQGFKNSPTLFNEALHRDLADFRIQHPDLILLQYVDDLLLAATSEQDCQRGTRALLQTLGNLGYRASAKKAQICQKQVKYLGYLLKEGQRWLTEARKETVMGQPTPKTPRQLREFLGKAGFCRLFIPGFAEMAAPLYPLTKPGTLFNWGPDQQKAYQEIKQALLTAPALGLPDLTKPFELFVDEKQGYAKGVLTQKLGPWRRPVAYLSKKLDPVAAGWPPCLRMVAAIAVLTKDAGKLTMGQPLVILAPHAVEALVKQPPDRWLSNARMTHYQAMLLDTDRVQFGPVVALNPATLLPLPEKEAPHDCLEILAETHGTRPDLTDQPIPDADYTWYTDGSSFLQEGQRRAGAAVTTETEVIWARALPAGTSAQRAELIALTQALKMAEGKKLNVYTDSRYAFATAHVHGEIYRRRGWLTSEGREIKNKNEILALLKALFLPKRLSIIHCPGHQKGNSAEARGNRMADQAAREAAMKAVLETSTLL

SEQ ID NO: 3262 - protein, 1082 aa, synthetic construct
  source 1..1082: note = Description of Artificial Sequence: Synthetic polypeptide
MAAFKPNPINYILGLDIGIASVGWAMVEIDEEENPIRLIDLGVRVFERAEVPKTGDSLAMARRLARSVRRLTRRRAHRLLRARRLLKREGVLQAADFDENGLIKSLPNTPWQLRAAALDRKLTPLEWSAVLLHLIKHRGYLSQRKNEGETADKELGALLKGVANNAHALQTGDFRTPAELALNKFEKESGHIRNQRGDYSHTFSRKDLQAELILLFEKQKEFGNPHVSGGLKEGIETLLMTQRPALSGDAVQKMLGHCTFEPAEPKAAKNTYTAERFIWLTKLNNLRILEQGSERPLTDTERATLMDEPYRKSKLTYAQARKLLGLEDTAFFKGLRYGKDNAEASTLMEMKAYHAISRALEKEGLKDKKSPLNLSSELQDEIGTAFSLFKTDEDITGRLKDRVQPEILEALLKHISFDKFVQISLKALRRIVPLMEQGKRYDEACAEIYGDHYGKKNTEEKIYLPPIPADEIRNPVVLRALSQARKVINGVVRRYGSPARIHIETAREVGKSFKDRKEIEKRQEENRKDREKAAAKFREYFPNFVGEPKSKDILKLRLYEQQHGKCLYSGKEINLVRLNEKGYVEIDHALPFSRTWDDSFNNKVLVLGSENQNKGNQTPYEYFNGKDNSREWQEFKARVETSRFPRSKKQRILLQKFDEDGFKECNLNDTRYVNRFLCQFVADHILLTGKGKRRVFASNGQITNLLRGFWGLRKVRAENDRHHALDAVVVACSTVAMQQKITRFVRYKEMNAFDGKTIDKETGKVLHQKTHFPQPWEFFAQEVMIRVFGKPDGKPEFEEADTPEKLRTLLAEKLSSRPEAVHEYVTPLFVSRAPNRKMSGAHKDTLRSAKRFVKHNEKISVKRVWLTEIKLADLENMVNYKNGREIELYEALKARLEAYGGNAKQAFDPKDNPFYKKGGQLVKAVRVEKTQESGVLLNKKNAYTIADNGDMVRVDVFCKVDKKGKNQYFIVPIYAWQVAENILPDIDCKGYRIDDSYTFCFSLHKYDLIAFQKDEKSKVEFAYYINCDSSNGRFYLAWHDKGSKEQQFRISTQNLVLIQKYQVNELGKEIRPCRLKKRPPVR

SEQ ID NO: 3263 - protein, 1055 aa, synthetic construct
  source 1..1055: note = Description of Artificial Sequence: Synthetic polypeptide
MQNNPLNYILGLDLGIASIGWAVVEIDEESSPIRLIDVGVRTFERAEVAKTGESLALSRRLARSSRRLIKRRAERLKKAKRLLKAEKILHSIDEKLPINVWQLRVKGLKEKLERQEWAAVLLHLSKHRGYLSQRKNEGKSDNKELGALLSGIASNHQMLQSSEYRTPAEIAVKKFQVEEGHIRNQRGSYTHTFSRLDLLAEMELLFQRQAELGNSYTSTTLLENLTALLMWQKPALAGDAILKMLGKCTFEPSEYKAAKNSYSAERFVWLTKLNNLRILENGTERALNDNERFALLEQPYEKSKLTYAQVRAMLALSDNAIFKGVRYLGEDKKTVESKTTLIEMKFYHQIRKTLGSAELKKEWNELKGNSDLLDEIGTAFSLYKTDDDICRYLEGKLPERVLNALLENLNFDKFIQLSLKALHQILPLMLQGQRYDEAVSAIYGDHYGKKSTETTRLLPTIPADEIRNPVVLRTLTQARKVINAVVRLYGSPARIHIETAREVGKSYQDRKKLEKQQEDNRKQRESAVKKFKEMFPHFVGEPKGKDILKMRLYELQQAKCLYSGKSLELHRLLEKGYVEVDHALPFSRTWDDSFNNKVLVLANENQNKGNLTPYEWLDGKNNSERWQHFVVRVQTSGFSYAKKQRILNHKLDEKGFIERNLNDTRYVARFLCNFIADNMLLVGKGKRNVFASNGQITALLRHRWGLQKVREQNDRHHALDAVVVACSTVAMQQKITRFVRYNEGNVFSGERIDRETGEIIPLHFPSPWAFFKENVEIRIFSENPKLELENRLPDYPQYNHEWVQPLFVSRMPTRKMTGQGHMETVKSAKRLNEGLSVLKVPLTQLKLSDLERMVNRDREIALYESLKARLEQFGNDPAKAFAEPFYKKGGALVKAVRLEQTQKSGVLVRDGNGVADNASMVRVDVFTKGGKYFLVPIYTWQVAKGILPNRAATQGKDENDWDIMDEMATFQFSLCQNDLIKLVTKKKTIFGYFNGLNRATSNINIKEHDLDKSKGKLGIYLEVGVKLAISLEKYQVDELGKNIRPCRPTKRQHVR

SEQ ID NO: 3264 - protein, 1053 aa, synthetic construct
  source 1..1053: note = Description of Artificial Sequence: Synthetic polypeptide
MKRNYILGLDIGITSVGYGIIDYETRDVIDAGVRLFKEANVENNEGRRSKRGARRLKRRRRHRIQRVKKLLFDYNLLTDHSELSGINPYEARVKGLSQKLSEEEFSAALLHLAKRRGVHNVNEVEEDTGNELSTKEQISRNSKALEEKYVAELQLERLKKDGEVRGSINRFKTSDYVKEAKQLLKVQKAYHQLDQSFIDTYIDLLETRRTYYEGPGEGSPFGWKDIKEWYEMLMGHCTYFPEELRSVKYAYNADLYNALNDLNNLVITRDENEKLEYYEKFQIIENVFKQKKKPTLKQIAKEILVNEEDIKGYRVTSTGKPEFTNLKVYHDIKDITARKEIIENAELLDQIAKILTIYQSSEDIQEELTNLNSELTQEEIEQISNLKGYTGTHNLSLKAINLILDELWHTNDNQIAIFNRLKLVPKKVDLSQQKEIPTTLVDDFILSPVVKRSFIQSIKVINAIIKKYGLPNDIIIELAREKNSKDAQKMINEMQKRNRQTNERIEEIIRTTGKENAKYLIEKIKLHDMQEGKCLYSLEAIPLEDLLNNPFNYEVDHIIPRSVSFDNSFNNKVLVKQEENSKKGNRTPFQYLSSSDSKISYETFKKHILNLAKGKGRISKTKKEYLLEERDINRFSVQKDFINRNLVDTRYATRGLMNLLRSYFRVNNLDVKVKSINGGFTSFLRRKWKFKKERNKGYKHHAEDALIIANADFIFKEWKKLDKAKKVMENQMFEEKQAESMPEIETEQEYKEIFITPHQIKHIKDFKDYKYSHRVDKKPNRELINDTLYSTRKDDKGNTLIVNNLNGLYDKDNDKLKKLINKSPEKLLMYHHDPQTYQKLKLIMEQYGDEKNPLYKYYEETGNYLTKYSKKDNGPVIKKIKYYGNKLNAHLDITDDYPNSRNKVVKLSLKPYRFDVYLDNGVYKFVTVKNLDVIKKENYYEVNSKCYEEAKKLKKISNQAEFIASFYNNDLIKINGELYRVIGVNNDLLNRIEVNMIDITYREYLENMNDKRPPRIIKTIASKTQSIKKYSTDILGNLYEVKSKKHPQIIKKG

SEQ ID NO: 3265 - protein, 1053 aa, synthetic construct
  source 1..1053: note = Description of Artificial Sequence: Synthetic polypeptide
MKRNYILGLDIGITSVGYGIIDYETRDVIDAGVRLFKEANVENNEGRRSKRGARRLKRRRRHRIQRVKKLLFDYNLLTDHSELSGINPYEARVKGLSQKLSEEEFSAALLHLAKRRGVHNVNEVEEDTGNELSTKEQISRNSKALEEKYVAELQLERLKKDGEVRGSINRFKTSDYVKEAKQLLKVQKAYHQLDQSFIDTYIDLLETRRTYYEGPGEGSPFGWKDIKEWYEMLMGHCTYFPEELRSVKYAYNADLYNALNDLNNLVITRDENEKLEYYEKFQIIENVFKQKKKPTLKQIAKEILVNEEDIKGYRVTSTGKPEFTNLKVYHDIKDITARKEIIENAELLDQIAKILTIYQSSEDIQEELTNLNSELTQEEIEQISNLKGYTGTHNLSLKAINLILDELWHTNDNQIAIFNRLKLVPKKVDLSQQKEIPTTLVDDFILSPVVKRSFIQSIKVINAIIKKYGLPNDIIIELAREKNSKDAQKMINEMQKRNRQTNERIEEIIRTTGKENAKYLIEKIKLHDMQEGKCLYSLEAIPLEDLLNNPFNYEVDHIIPRSVSFDNSFNNKVLVKQEENSKKGNRTPFQYLSSSDSKISYETFKKHILNLAKGKGRISKTKKEYLLEERDINRFSVQKDFINRNLVDTRYATRGLMNLLRSYFRVNNLDVKVKSINGGFTSFLRRKWKFKKERNKGYKHHAEDALIIANADFIFKEWKKLDKAKKVMENQMFEEKQAESMPEIETEQEYKEIFITPHQIKHIKDFKDYKYSHRVDKKPNRKLINDTLYSTRKDDKGNTLIVNNLNGLYDKDNDKLKKLINKSPEKLLMYHHDPQTYQKLKLIMEQYGDEKNPLYKYYEETGNYLTKYSKKDNGPVIKKIKYYGNKLNAHLDITDDYPNSRNKVVKLSLKPYRFDVYLDNGVYKFVTVKNLDVIKKENYYEVNSKCYEEAKKLKKISNQAEFIASFYKNDLIKINGELYRVIGVNNDLLNRIEVNMIDITYREYLENMNDKRPPHIIKTIASKTQSIKKYSTDILGNLYEVKSKKHPQIIKKG

SEQ ID NO: 3266 - protein, 1061 aa, synthetic construct
  source 1..1061: note = Description of Artificial Sequence: Synthetic polypeptide
MQENQQKQNYILGLDIGITSVGYGLIDSKTREVIDAGVRLFPEADSENNSNRRSKRGARRLKRRRIHRLNRVKDLLADYQMIDLNNVPKSTDPYTIRVKGLREPLTKEEFAIALLHIAKRRGLHNISVSMGDEEQDNELSTKQQLQKNAQQLQDKYVCELQLERLTNINKVRGEKNRFKTEDFVKEVKQLCETQRQYHNIDDQFIQQYIDLVSTRREYFEGPGNGSPYGWDGDLLKWYEKLMGRCTYFPEELRSVKYAYSADLFNALNDLNNLVVTRDDNPKLEYYEKYHIIENVFKQKKNPTLKQIAKEIGVQDYDIRGYRITKSGKPQFTSFKLYHDLKNIFEQAKYLEDVEMLDEIAKILTIYQDEISIKKALDQLPELLTESEKSQIAQLTGYTGTHRLSLKCIHIVIDELWESPENQMEIFTRLNLKPKKVEMSEIDSIPTTLVDEFILSPVVKRAFIQSIKVINAVINRFGLPEDIIIELAREKNSKDRRKFINKLQKQNEATRKKIEQLLAKYGNTNAKYMIEKIKLHDMQEGKCLYSLEAIPLEDLLSNPTHYEVDHIIPRSVSFDNSLNNKVLVKQSENSKKGNRTPYQYLSSNESKISYNQFKQHILNLSKAKDRISKKKRDMLLEERDINKFEVQKEFINRNLVDTRYATRELSNLLKTYFSTHDYAVKVKTINGGFTNHLRKVWDFKKHRNHGYKHHAEDALVIANADFLFKTHKALRRTDKILEQPGLEVNDTTVKVDTEEKYQELFETPKQVKNIKQFRDFKYSHRVDKKPNRQLINDTLYSTREIDGETYVVQTLKDLYAKDNEKVKKLFTERPQKILMYQHDPKTFEKLMTILNQYAEAKNPLAAYYEDKGEYVTKYAKKGNGPAIHKIKYIDKKLGSYLDVSNKYPETQNKLVKLSLKSFRFDIYKCEQGYKMVSIGYLDVLKKDNYYYIPKDKYEAEKQKKKIKESDLFVGSFYYNDLIMYEDELFRVIGVNSDINNLVELNMVDITYKDFCEVNNVTGEKRIKKTIGKRVVLIEKYTTDILGNLYKTPLPKKPQLIFKRGEL

SEQ ID NO: 3267 - protein, 1061 aa, synthetic construct
  source 1..1061: note = Description of Artificial Sequence: Synthetic polypeptide
MQENQQKQNYILGLDIGITSVGYGLIDSKTREVIDAGVRLFPEADSENNSNRRSKRGARRLKRRRIHRLNRVKDLLADYQMIDLNNVPKSTDPYTIRVKGLREPLTKEEFAIALLHIAKRRGLHNISVSMGDEEQDNELSTKQQLQKNAQQLQDKYVCELQLERLTNINKVRGEKNRFKTEDFVKEVKQLCETQRQYHNIDDQFIQQYIDLVSTRREYFEGPGNGSPYGWDGDLLKWYEKLMGRCTYFPEELRSVKYAYSADLFNALNDLNNLVVTRDDNPKLEYYEKYHIIENVFKQKKNPTLKQIAKEIGVQDYDIRGYRITKSGKPQFTSFKLYHDLKNIFEQAKYLEDVEMLDEIAKILTIYQDEISIKKALDQLPELLTESEKSQIAQLTGYTGTHRLSLKCIHIVIDELWESPENQMEIFTRLNLKPKKVEMSEIDSIPTTLVDEFILSPVVKRAFIQSIKVINAVINRFGLPEDIIIELAREKNSKDRRKFINKLQKQNEATRKKIEQLLAKYGNTNAKYMIEKIKLHDMQEGKCLYSLEAIPLEDLLSNPTHYEVDHIIPRSVSFDNSLNNKVLVKQSENSKKGNRTPYQYLSSNESKISYNQFKQHILNLSKAKDRISKKKRDMLLEERDINKFEVQKEFINRNLVDTRYATRELSNLLKTYFSTHDYAVKVKTINGGFTNHLRKVWDFKKHRNHGYKHHAEDALVIANADFLFKTHKALRRTDKILEQPGLEVNDTTVKVDTEEKYQELFETPKQVKNIKQFRDFKYSHRVDKKPNRKLINDTLYSTREIDGETYVVQTLKDLYAKDNEKVKKLFTERPQKILMYQHDPKTFEKLMTILNQYAEAKNPLAAYYEDKGEYVTKYAKKGNGPAIHKIKYIDKKLGSYLDVSNKYPETQNKLVKLSLKSFRFDIYKCEQGYKMVSIGYLDVLKKDNYYYIPKDKYEAEKQKKKIKESDLFVGSFYKNDLIMYEDELFRVIGVNSDINNLVELNMVDITYKDFCEVNNVTGEKHIKKTIGKRVVLIEKYTTDILGNLYKTPLPKKPQLIFKRGEL

SEQ ID NO: 3268 - protein, 1375 aa, synthetic construct
  source 1..1375: note = Description of Artificial Sequence: Synthetic polypeptide
MEKKYSIGLDIGTNSVGWAVITDDYKVPSKKFKVLGNTNRKSIKKNLMGALLFDSGETAEATRLKRTARRRYTRRKNRIRYLQEIFANEMAKLDDSFFQRLEESFLVEEDKKNERHPIFGNLADEVAYHRNYPTIYHLRKKLADSPEKADLRLIYLALAHIIKFRGHFLIEGKLNAENSDVAKLFYQLIQTYNQLFEESPLDEIEVDAKGILSARLSKSKRLEKLIAVFPNEKKNGLFGNIIALALGLTPNFKSNFDLTEDAKLQLSKDTYDDDLDELLGQIGDQYADLFSAAKNLSDAILLSDILRSNSEVTKAPLSASMVKRYDEHHQDLALLKTLVRQQFPEKYAEIFKDDTKNGYAGYVGADKKLRKRSGKLATEEEFYKFIKPILEKMDGAEELLAKLNRDDLLRKQRTFDNGSIPHQIHLKELHAILRRQEEFYPFLKENREKIEKILTFRIPYYVGPLARGNSRFAWLTRKSEEAITPWNFEEVVDKGASAQSFIERMTNFDEQLPNKKVLPKHSLLYEYFTVYNELTKVKYVTERMRKPEFLSGEQKKAIVDLLFKTNRKVTVKQLKEDYFKKIECFDSVEIIGVEDRFNASLGTYHDLLKIIKDKDFLDNEENEDILEDIVLTLTLFEDREMIEERLKTYAHLFDDKVMKQLKRRHYTGWGRLSRKMINGIRDKQSGKTILDFLKSDGFSNRNFMQLIHDDSLTFKEEIEKAQVSGQGDSLHEQIADLAGSPAIKKGILQTVKIVDELVKVMGHKPENIVIEMARENQTTTKGLQQSRERKKRIEEGIKELESQILKENPVENTQLQNEKLYLYYLQNGRDMYVDQELDINRLSDYDVDHIVPQSFIKDDSIDNKVLTRSVENRGKSDNVPSEEVVKKMKNYWRQLLNAKLITQRKFDNLTKAERGGLSEADKAGFIKRQLVETRQITKHVARILDSRMNTKRDKNDKPIREVKVITLKSKLVSDFRKDFQLYKVRDINNYHHAHDAYLNAVVGTALIKKYPKLESEFVYGDYKVYDVRKMIAKSEQEIGKATAKRFFYSNIMNFFKTEVKLANGEIRKRPLIETNGETGEVVWNKEKDFATVRKVLAMPQVNIVKKTEVQTGGFSKESILSKRESAKLIPRKKGWDTRKYGGFGSPTVAYSILVVAKVEKGKAKKLKSVKVLVGITIMEKGSYEKDPIGFLEAKGYKDIKKELIFKLPKYSLFELENGRRRMLASAKELQKANELVLPQHLVRLLYYTQNISATTGSNNLGYIEQHREEFKEIFEKIIDFSEKYILKNKVNSNLKSSFDEQFAVSDSILLSNSFVSLLKYTSFGASGGFTFLDLDVKQGRLRYQTVTEVLDATLIYQSITGLYETRTDLSQLGGD

SEQ ID NO: 3269 - protein, 1368 aa, synthetic construct [sequence omitted]

SEQ ID NO: 3270 - protein, 1368 aa, synthetic construct
  source 1..1368: note = Description of Artificial Sequence: Synthetic polypeptide
MDKKYSIGLDIGTNSVGWAVITDEYKVPSKKFKVLGNTDRHSIKKNLIGALLFDSGETAEATRLKRTARRRYTRRKNRICYLQEIFSNEMAKVDDSFFHRLEESFLVEEDKKHERHPIFGNIVDEVAYHEKYPTIYHLRKKLVDSTDKADLRLIYLALAHMIKFRGHFLIEGDLNPDNSDVDKLFIQLVQTYNQLFEENPINASGVDAKAILSARLSKSRRLENLIAQLPGEKKNGLFGNLIALSLGLTPNFKSNFDLAEDAKLQLSKDTYDDDLDNLLAQIGDQYADLFLAAKNLSDAILLSDILRVNTEITKAPLSASMIKRYDEHHQDLTLLKALVRQQLPEKYKEIFFDQSKNGYAGYIDGGASQEEFYKFIKPILEKMDGTEELLVKLNREDLLRKQRTFDNGSIPHQIHLGELHAILRRQEDFYPFLKDNREKIEKILTFRIPYYVGPLARGNSRFAWMTRKSEETITPWNFEEVVDKGASAQSFIERMTNFDKNLPNEKVLPKHSLLYEYFTVYNELTKVKYVTEGMRKPAFLSGEQKKAIVDLLFKTNRKVTVKQLKEDYFKKIECFDSVEISGVEDRFNASLGTYHDLLKIIKDKDFLDNEENEDILEDIVLTLTLFEDREMIEERLKTYAHLFDDKVMKQLKRRRYTGWGRLSRKLINGIRDKQSGKTILDFLKSDGFANRNFMQLIHDDSLTFKEDIQKAQVSGQGDSLHEHIANLAGSPAIKKGILQTVKVVDELVKVMGRHKPENIVIEMARENQTTQKGQKNSRERMKRIEEGIKELGSQILKEHPVENTQLQNEKLYLYYLQNGRDMYVDQELDINRLSDYDVDHIVPQSFLKDDSIDNKVLTRSDKNRGKSDNVPSEEVVKKMKNYWRQLLNAKLITQRKFDNLTKAERGGLSELDKAGFIKRQLVETRQITKHVAQILDSRMNTKYDENDKLIREVKVITLKSKLVSDFRKDFQFYKVREINNYHHAHDAYLNAVVGTALIKKYPKLESEFVYGDYKVYDVRKMIAKSEQEIGKATAKYFFYSNIMNFFKTEITLANGEIRKRPLIETNGETGEIVWDKGRDFATVRKVLSMPQVNIVKKTEVQTGGFSKESIRPKRNSDKLIARKKDWDPKKYGGFVSPTVAYSVLVVAKVEKGKSKKLKSVKELLGITIMERSSFEKNPIDFLEAKGYKEVKKDLIIKLPKYSLFELENGRKRMLASARFLQKGNELALPSKYVNFLYLASHYEKLKGSPEDNEQKQLFVEQHKHYLDEIIEQISEFSKRVILADANLDKVLSAYNKHRDKPIREQAENIIHLFTLTNLGAPRAFKYFDTTIDRKVYRSTKEVLDATLIHQSITGLYETRIDLSQLGGD

SEQ ID NO: 3271 - protein, 1368 aa, synthetic construct
  source 1..1368: note = Description of Artificial Sequence: Synthetic polypeptide
MDKKYSIGLDIGTNSVGWAVITDEYKVPSKKFKVLGNTDRHSIKKNLIGALLFDSGETAERTRLKRTARRRYTRRKNRICYLQEIFSNEMAKVDDSFFHRLEESFLVEEDKKHERHPIFGNIVDEVAYHEKYPTIYHLRKKLVDSTDKADLRLIYLALAHMIKFRGHFLIEGDLNPDNSDVDKLFIQLVQTYNQLFEENPINASGVDAKAILSARLSKSRRLENLIAQLPGEKKNGLFGNLIALSLGLTPNFKSNFDLAEDAKLQLSKDTYDDDLDNLLAQIGDQYADLFLAAKNLSDAILLSDILRVNTEITKAPLSASMIKRYDEHHQDLTLLKALVRQQLPEKYKEIFFDQSKNGYAGYIDGGASQEEFYKFIKPILEKMDGTEELLVKLNREDLLRKQRTFDNGSIPHQIHLGELHAILRRQEDFYPFLKDNREKIEKILTFRIPYYVGPLARGNSRFAWMTRKSEETITPWNFEEVVDKGASAQSFIERMTNFDKNLPNEKVLPKHSLLYEYFTVYNELTKVKYVTEGMRKPAFLSGEQKKAIVDLLFKTNRKVTVKQLKEDYFKKIECFDSVEISGVEDRFNASLGTYHDLLKIIKDKDFLDNEENEDILEDIVLTLTLFEDREMIEERLKTYAHLFDDKVMKQLKRRRYTGWGRLSRKLINGIRDKQSGKTILDFLKSDGFANRNFMQLIHDDSLTFKEDIQKAQVSGQGDSLHEHIANLAGSPAIKKGILQTVKVVDELVKVMGRHKPENIVIEMARENQTTQKGQKNSRERMKRIEEGIKELGSQILKEHPVENTQLQNEKLYLYYLQNGRDMYVDQELDINRLSDYDVDHIVPQSFLKDDSIDNKVLTRSDKNRGKSDNVPSEEVVKKMKNYWRQLLNAKLITQRKFDNLTKAERGGLSELDKAGFIKRQLVETRQITKHVAQILDSRMNTKYDENDKLIREVKVITLKSKLVSDFRKDFQFYKVREINNYHHAHDAYLNAVVGTALIKKYPKLESEFVYGDYKVYDVRKMIAKSEQEIGKATAKYFFYSNIMNFFKTEITLANGEIRKRPLIETNGETGEIVWDKGRDFATVRKVLSMPQVNIVKKTEVQTGGFSKESIRPKRNSDKLIARKKDWDPKKYGGFLWPTVAYSVLVVAKVEKGKSKKLKSVKELLGITIMERSSFEKNPIDFLEAKGYKEVKKDLIIKLPKYSLFELENGRKRMLASAKQLQKGNELALPSKYVNFLYLASHYEKLKGSPEDNEQKQLFVEQHKHYLDEIIEQISEFSKRVILADANLDKVLSAYNKHRDKPIREQAENIIHLFTLTRLGAPRAFKYFDTTIDPKQYRSTKEVLDATLIHQSITGLYETRIDLSQLGGD

SEQ ID NO: 3272 - protein, 1121 aa, synthetic construct
  source 1..1121: note = Description of Artificial Sequence: Synthetic polypeptide
MSDLVLGLDIGIGSVGVGILNKVTGEIIHKNSRIFPAAQAENNLVRRTNRQGRRLARRKKHRRVRLNRLFEESGLITDFTKISINLNPYQLRVKGLTDELSNEELFIALKNMVKHRGISYLDDASDDGNSSVGDYAQIVKENSKQLETKTPGQIQLERYQTYGQLRGDFTVEKDGKKHRLINVFPTSAYRSEALRILQTQQEFNPQITDEFINRYLEILTGKRKYYHGPGNEKSRTDYGRYRTSGETLDNIFGILIGKCTFYPDEFRAAKASYTAQEFNLLNDLNNLTVPTETKKLSKEQKNQIINYVKNEKAMGPAKLFKYIAKLLSCDVADIKGYRIDKSGKAEIHTFEAYRKMKTLETLDIEQMDRETLDKLAYVLTLNTEREGIQEALEHEFADGSFSQKQVDELVQFRKANSSIFGKGWHNFSVKLMMELIPELYETSEEQMTILTRLGKQKTTSSSNKTKYIDEKLLTEEIYNPVVAKSVRQAIKIVNAAIKEYGDFDNIVIEMARETNEDDEKKAIQKIQKANKDEKDAAMLKAANQYNGKAELPHSVFHGHKQLATKIRLWHQQGERCLYTGKTISIHDLINNSNQFEVDHILPLSITFDDSLANKVLVYATANQEKGQRTPYQALDSMDDAWSFRELKAFVRESKTLSNKKKEYLLTEEDISKFDVRKKFIERNLVDTRYASRVVLNALQEHFRAHKIDTKVSVVRGQFTSQLRRHWGIEKTRDTYHHHAVDALIIAASSQLNLWKKQKNTLVSYSEDQLLDIETGELISDDEYKESVFKAPYQHFVDTLKSKEFEDSILFSYQVDSKFNRKISDATIYATRQAKVGKDKADETYVLGKIKDIYTQDGYDAFMKIYKKDKSKFLMYRHDPQTFEKVIEPILENYPNKQINEKGKEVPCNPFLKYKEEHGYIRKYSKKGNGPEIKSLKYYDSKLGNHIDITPKDSNNKVVLQSVSPWRADVYFNKTTGKYEILGLKYADLQFEKGTGTYKISQEKYNDIKKKEGVDSDSEFKFTLYKNDLLLVKDTETKEQQLFRFLSRTMPKQKHYVELKPYDKQKFEGGEALIKVLGNVANSGQCKKGLGKSNISIYKVRTDVLGNQHIIKNEGDKPKLDF

SEQ ID NO: 3273 - protein, 1092 aa, synthetic construct
  source 1..1092: note = Description of Artificial Sequence: Synthetic polypeptide
MAYTMGIDVGIASCGWAIVDLERQRIIDIGVRTFEKAENPKNGEALAVPRREARSSRRRLRRKKHRIERLKHMFVRNGLAVDIQHLEQTLRSQNEIDVWQLRVDGLDRMLTQKEWLRVLIHLAQRRGFQSNRKTDGSSEDGQVLVNVTENDRLMEEKDYRTVAEMMVKDEKFSDHKRNKNGNYHGVVSRSSLLVEIHTLFETQRQHHNSLASKDFELEYVNIWSAQRPVATKDQIEKMIGTCTFLPKEKRAPKASWHFQYFMLLQTINHIRITNVQGTRSLNKEEIEQVVNMALTKSKVSYHDTRKILDLSEEYQFVGLDYGKEDEKKKVESKETIIKLDDYHKLNKIFNEVELAKGETWEADDYDTVAYALTFFKDDEDIRDYLQNKYKDSKNRLVKNLANKEYTNELIGKVSTLSFRKVGHLSLKALRKIIPFLEQGMTYDKACQAAGFDFQGISKKKRSVVLPVIDQISNPVVNRALTQTRKVINALIKKYGSPETIHIETARELSKTFDERKNITKDYKENRDKNEHAKKHLSELGIINPTGLDIVKYKLWCEQQGRCMYSNQPISFERLKESGYTEVDHIIPYSRSMNDSYNNRVLVMTRENREKGNQTPFEYMGNDTQRWYEFEQRVTTNPQIKKEKRQNLLLKGFTNRRELEMLERNLNDTRYITKYLSHFISTNLEFSPSDKKKKVVNTSGRITSHLRSRWGLEKNRGQNDLHHAMDAIVIAVTSDSFIQQVTNYYKRKERRELNGDDKFPLPWKFFREEVIARLSPNPKEQIEALPNHFYSEDELADLQPIFVSRMPKRSITGEAHQAQFRRVVGKTKEGKNITAKKTALVDISYDKNGDFNMYGRETDPATYEAIKERYLEFGGNVKKAFSTDLHKPKKDGTKGPLIKSVRIMENKTLVHPVNKGKGVVYNSSIVRTDVFQRKEKYYLLPVYVTDVTKGKLPNKVIVAKKGYHDWIEVDDSFTFLFSLYPNDLIFIRQNPKKKISLKKRIESHSISDSKEVQEIHAYYKGVDSSTAAIEFIIHDGSYYAKGVGVQNLDCFEKYQVDILGNYFKVKGEKRLELETSDSNHKGKDVNSIKSTSR

SEQ ID NO: 3274 - protein, 1053 aa, synthetic construct
  source 1..1053: note = Description of Artificial Sequence: Synthetic polypeptide
MKRNYILGLDIGITSVGYGIIDYETRDVIDAGVRLFKEANVENNEGRRSKRGARRLKRRRRHRIQRVKKLLFDYNLLTDHSELSGINPYEARVKGLSQKLSEEEFSAALLHLAKRRGVHNVNEVEEDTGNELSTKEQISRNSKALEEKYVAELQLERLKKDGEVRGSINRFKTSDYVKEAKQLLKVQKAYHQLDQSFIDTYIDLLETRRTYYEGPGEGSPFGWKDIKEWYEMLMGHCTYFPEELRSVKYAYNADLYNALNDLNNLVITRDENEKLEYYEKFQIIENVFKQKKKPTLKQIAKEILVNEEDIKGYRVTSTGKPEFTNLKVYHDIKDITARKEIIENAELLDQIAKILTIYQSSEDIQEELTNLNSELTQEEIEQISNLKGYTGTHNLSLKAINLILDELWHTNDNQIAIFNRLKLVPKKVDLSQQKEIPTTLVDDFILSPVVKRSFIQSIKVINAIIKKYGLPNDIIIELAREKNSKDAQKMINEMQKRNRQTNERIEEIIRTTGKENAKYLIEKIKLHDMQEGKCLYSLEAIPLEDLLNNPFNYEVDHIIPRSVSFDNSFNNKVLVKQEENSKKGNRTPFQYLSSSDSKISYETFKKHILNLAKGKGRISKTKKEYLLEERDINRFSVQKDFINRNLVDTRYATRGLMNLLRSYFRVNNLDVKVKSINGGFTSFLRRKWKFKKERNKGYKHHAEDALIIANADFIFKEWKKLDKAKKVMENQMFEEKQAESMPEIETEQEYKEIFITPHQIKHIKDFKDYKYSHRVDKKPNRKLINDTLYSTRKDDKGNTLIVNNLNGLYDKDNDKLKKLINKSPEKLLMYHHDPQTYQKLKLIMEQYGDEKNPLYKYYEETGNYLTKYSKKDNGPVIKKIKYYGNKLNAHLDITDDYPNSRNKVVKLSLKPYRFDVYLDNGVYKFVTVKNLDVIKKENYYEVNSKCYEEAKKLKKISNQAEFIASFYKNDLIKINGELYRVIGVNSDKNNLIEVNMIDITYREYLENMNDKRPPHIIKTIASKTQSIKKYSTDILGNLYEVKSKKHPQIIKKG

SEQ ID NO: 3275 - protein, 1053 aa, synthetic construct
  source 1..1053: note = Description of Artificial Sequence: Synthetic polypeptide
MKRNYILGLDIGITSVGYGIIDYETRDVIDAGVRLFKEANVENNEGRRSKRGARRLKRRRRHRIQRVKKLLFDYNLLTDHSELSGINPYEARVKGLSQKLSEEEFSAALLHLAKRRGVHNVNEVEEDTGNELSTKEQISRNSKALEEKYVAELQLERLKKDGEVRGSINRFKTSDYVKEAKQLLKVQKAYHQLDQSFIDTYIDLLETRRTYYEGPGEGSPFGWKDIKEWYEMLMGHCTYFPEELRSVKYAYNADLYNALNDLNNLVITRDENEKLEYYEKFQIIENVFKQKKKPTLKQIAKEILVNEEDIKGYRVTSTGKPEFTNLKVYHDIKDITARKEIIENAELLDQIAKILTIYQSSEDIQEELTNLNSELTQEEIEQISNLKGYTGTHNLSLKAINLILDELWHTNDNQIAIFNRLKLVPKKVDLSQQKEIPTTLVDDFILSPVVKRSFIQSIKVINAIIKKYGLPNDIIIELAREKNSKDAQKMINEMQKRNRQTNERIEEIIRTTGKENAKYLIEKIKLHDMQEGKCLYSLEAIPLEDLLNNPFNYEVDHIIPRSVSFDNSFNNKVLVKQEENSKKGNRTPFQYLSSSDSKISYETFKKHILNLAKGKGRISKTKKEYLLEERDINRFSVQKDFINRNLVDTRYATRGLMNLLRSYFRVNNLDVKVKSINGGFTSFLRRKWKFKKERNKGYKHHAEDALIIANADFIFKEWKKLDKAKKVMENQMFEEKQAESMPEIETEQEYKEIFITPHQIKHIKDFKDYKYSHRVDKKPNRKLINDTLYSTRKDDKGNTLIVNNLNGLYDKDNDKLKKLINKSPEKLLMYHHDPQTYQKLKLIMEQYGDEKNPLYKYYEETGNYLTKYSKKDNGPVIKKIKYYGNKLNAHLDITDDYPNSRNKVVKLSLKPYRFDVYLDNGVYKFVTVKNLDVIKKENYYEVNSKCYEEAKKLKKISNQAEFIASFYKNDLIKINGELYRVIGVNNSTRNIVELNMIDITYREYLENMNDKRPPHIIKTIASKTQSIKKYSTDILGNLYEVKSKKHPQIIKKG

SEQ ID NO: 3276 - protein, 1053 aa, synthetic construct
  source 1..1053: note = Description of Artificial Sequence: Synthetic polypeptide
MKRNYILGLDIGITSVGYGIIDYETRDVIDAGVRLFKEANVENNEGRRSKRGARRLKRRRRHRIQRVKKLLFDYNLLTDHSELSGINPYEARVKGLSQKLSEEEFSAALLHLAKRRGVHNVNEVEEDTGNELSTKEQISRNSKALEEKYVAELQLERLKKDGEVRGSINRFKTSDYVKEAKQLLKVQKAYHQLDQSFIDTYIDLLETRRTYYEGPGEGSPFGWKDIKEWYEMLMGHCTYFPEELRSVKYAYNADLYNALNDLNNLVITRDENEKLEYYEKFQIIENVFKQKKKPTLKQIAKEILVNEEDIKGYRVTSTGKPEFTNLKVYHDIKDITARKEIIENAELLDQIAKILTIYQSSEDIQEELTNLNSELTQEEIEQISNLKGYTGTHNLSLKAINLILDELWHTNDNQIAIFNRLKLVPKKVDLSQQKEIPTTLVDDFILSPVVKRSFIQSIKVINAIIKKYGLPNDIIIELAREKNSKDAQKMINEMQKRNRQTNERIEEIIRTTGKENAKYLIEKIKLHDMQEGKCLYSLEAIPLEDLLNNPFNYEVDHIIPRSVSFDNSFNNKVLVKQEENSKKGNRTPFQYLSSSDSKISYETFKKHILNLAKGKGRISKTKKEYLLEERDINRFSVQKDFINRNLVDTRYATRGLMNLLRSYFRVNNLDVKVKSINGGFTSFLRRKWKFKKERNKGYKHHAEDALIIANADFIFKEWKKLDKAKKVMENQMFEEKQAESMPEIETEQEYKEIFITPHQIKHIKDFKDYKYSHRVDKKPNRKLINDTLYSTRKDDKGNTLIVNNLNGLYDKDNDKLKKLINKSPEKLLMYHHDPQTYQKLKLIMEQYGDEKNPLYKYYEETGNYLTKYSKKDNGPVIKKIKYYGNKLNAHLDITDDYPNSRNKVVKLSLKPYRFDVYLDNGVYKFVTVKNLDVIKKENYYEVNSKCYEEAKKLKKISNQAEFIASFYKNDLIKINGELYRVIGVNSDDRNIIELNMIDITYREYLENMNDKRPPHIIKTIASKTQSIKKYSTDILGNLYEVKSKKHPQIIKKG

SEQ ID NO: 3277 - protein, 1053 aa, synthetic construct
  source 1..1053: note = Description of Artificial Sequence: Synthetic polypeptide
MKRNYILGLDIGITSVGYGIIDYETRDVIDAGVRLFKEANVENNEGRRSKRGARRLKRRRRHRIQRVKKLLFDYNLLTDHSELSGINPYEARVKGLSQKLSEEEFSAALLHLAKRRGVHNVNEVEEDTGNELSTKEQISRNSKALEEKYVAELQLERLKKDGEVRGSINRFKTSDYVKEAKQLLKVQKAYHQLDQSFIDTYIDLLETRRTYYEGPGEGSPFGWKDIKEWYEMLMGHCTYFPEELRSVKYAYNADLYNALNDLNNLVITRDENEKLEYYEKFQIIENVFKQKKKPTLKQIAKEILVNEEDIKGYRVTSTGKPEFTNLKVYHDIKDITARKEIIENAELLDQIAKILTIYQSSEDIQEELTNLNSELTQEEIEQISNLKGYTGTHNLSLKAINLILDELWHTNDNQIAIFNRLKLVPKKVDLSQQKEIPTTLVDDFILSPVVKRSFIQSIKVINAIIKKYGLPNDIIIELAREKNSKDAQKMINEMQKRNRQTNERIEEIIRTTGKENAKYLIEKIKLHDMQEGKCLYSLEAIPLEDLLNNPFNYEVDHIIPRSVSFDNSFNNKVLVKQEENSKKGNRTPFQYLSSSDSKISYETFKKHILNLAKGKGRISKTKKEYLLEERDINRFSVQKDFINRNLVDTRYATRGLMNLLRSYFRVNNLDVKVKSINGGFTSFLRRKWKFKKERNKGYKHHAEDALIIANADFIFKEWKKLDKAKKVMENQMFEEKQAESMPEIETEQEYKEIFITPHQIKHIKDFKDYKYSHRVDKKPNRKLINDTLYSTRKDDKGNTLIVNNLNGLYDKDNDKLKKLINKSPEKLLMYHHDPQTYQKLKLIMEQYGDEKNPLYKYYEETGNYLTKYSKKDNGPVIKKIKYYGNKLNAHLDITDDYPNSRNKVVKLSLKPYRFDVYLDNGVYKFVTVKNLDVIKKENYYEVNSKCYEEAKKLKKISNQAEFIASFYKNDLIKINGELYRVIGVNNNRLNKIELNMIDITYREYLENMNDKRPPHIIKTIASKTQSIKKYSTDILGNLYEVKSKKHPQIIKKG

SEQ ID NO: 3278 - protein, 1084 aa, synthetic construct
  source 1..1084: note = Description of Artificial Sequence: Synthetic polypeptide
MKYHVGIDVGTFSVGLAAIEVDDAGMPIKTLSLVSHIHDSGLDPDEIKSAVTRLASSGIARRTRRLYRRKRRRLQQLDKFIQRQGWPVIELEDYSDPLYPWKVRAELAASYIADEKERGEKLSVALRHIARHRGWRNPYAKVSSLYLPDGPSDAFKAIREEIKRASGQPVPETATVGQMVTLCELGTLKLRGEGGVLSARLQQSDYAREIQEICRMQEIGQELYRKIIDVVFAAESPKGSASSRVGKDPLQPGKNRALKASDAFQRYRIAALIGNLRVRVDGEKRILSVEEKNLVFDHLVNLTPKKEPEWVTIAEILGIDRGQLIGTATMTDDGERAGARPPTHDTNRSIVNSRIAPLVDWWKTASALEQHAMVKALSNAEVDDFDSPEGAKVQAFFADLDDDVHAKLDSLHLPVGRAAYSEDTLVRLTRRMLSDGVDLYTARLQEFGIEPSWTPPTPRIGEPVGNPAVDRVLKTVSRWLESATKTWGAPERVIIEHVREGFVTEKRAREMDGDMRRRAARNAKLFQEMQEKLNVQGKPSRADLWRYQSVQRQNCQCAYCGSPITFSNSEMDHIVPRAGQGSTNTRENLVAVCHRCNQSKGNTPFAIWAKNTSIEGVSVKEAVERTRHWVTDTGMRSTDFKKFTKAVVERFQRATMDEEIDARSMESVAWMANELRSRVAQHFASHGTTVRVYRGSLTAEARRASGISGKLKFFDGVGKSRLDRRHHAIDAAVIAFTSDYVAETLAVRSNLKQSQAHRQEAPQWREFTGKDAEHRAAWRVWCQKMEKLSALLTEDLRDDRVVVMSNVRLRLGNGSAHKETIGKLSKVKLSSQLSVSDIDKASSEALWCALTREPGFDPKEGLPANPERHIRVNGTHVYAGDNIGLFPVSAGSIALRGGYAELGSSFHHARVYKITSGKKPAFAMLRVYTIDLLPYRNQDLFSVELKPQTMSMRQAEKKLRDALATGNAEYLGWLVVDDELVVDTSKIATDQVKAVEAELGTIRRWRVDGFFSPSKLRLRPLQMSKEGIKKESAPELSKIIDRPGWLPAVNKLFSDGNVTVVRRDSLGRVRLESTAHLPVTWKVQ

SEQ ID NO: 3279 - protein, 984 aa, synthetic construct
  source 1..984: note = Description of Artificial Sequence: Synthetic polypeptide
MARILAFDIGISSIGWAFSENDELKDCGVRIFTKVENPKTGESLALPRRLARSARKRLARRKARLNHLKHLIANEFKLNYEDYQSFDESLAKAYKGSLISPYELRFRALNELLSKQDFARVILHIAKRRGYDDIKNSDDKEKGAILKAIKQNEEKLANYQSVGEYLYKEYFQKFKENSKEFTNVRNKKESYERCIAQSFLKDELKLIFKKQREFGFSFSKKFEEEVLSVAFYKRALKDFSHLVGNCSFFTDEKRAPKNSPLAFMFVALTRIINLLNNLKNTEGILYTKDDLNALLNEVLKNGTLTYKQTKKLLGLSDDYEFKGEKGTYFIEFKKYKEFIKALGEHNLSQDDLNEIAKDITLIKDEIKLKKALAKYDLNQNQIDSLSKLEFKDHLNISFKALKLVTPLMLEGKKYDEACNELNLKVAINEDKKDFLPAFNETYYKDEVTNPVVLRAIKEYRKVLNALLKKYGKVHKINIELAREVGKNHSQRAKIEKEQNENYKAKKDAELECEKLGLKINSKNILKLRLFKEQKEFCAYSGEKIKISDLQDEKMLEIDHIYPYSRSFDDSYMNKVLVFTKQNQEKLNQTPFEAFGNDSAKWQKIEVLAKNLPTKKQKRILDKNYKDKEQKNFKDRNLNDTRYIARLVLNYTKDYLDFLPLSDDENTKLNDTQKGSKVHVEAKSGMLTSALRHTWGFSAKDRNNHLHHAIDAVIIAYANNSIVKAFSDFKKEQESNSAELYAKKISELDYKNKRKFFEPFSGFRQKVLDKIDEIFVSKPERKKPSGALHEETFRKEEEFYQSYGGKEGVLKALELGKIRKVNGKIVKNGDMFRVDIFKHKKTNKFYAVPIYTMDFALKVLPNKAVARSKKGEIKDWILMDENYEFCFSLYKDSLILIQTKDMQEPEFVYYNAFTSSTVSLIVSKHDNKFETLSKNQKILFKNANEKEVIAKSIGIQNLKVFEKYIVSALGEVTKAEFRQREDFKK

SEQ ID NO: 3280 - protein, 1087 aa, synthetic construct
  source 1..1087: note = Description of Artificial Sequence: Synthetic polypeptide
MRYKIGLDIGITSVGWAVMNLDIPRIEDLGVRIFDRAENPQTGESLALPRRLARSARRRLRRRKHRLERIRRLVIREGILTKEELDKLFEEKHEIDVWQLRVEALDRKLNNDELARVLLHLAKRRGFKSNRKSERSNKENSTMLKHIEENRAILSSYRTVGEMIVKDPKFALHKRNKGENYTNTIARDDLEREIRLIFSKQREFGNMSCTEEFENEYITIWASQRPVASKDDIEKKVGFCTFEPKEKRAPKATYTFQSFIAWEHINKLRLISPSGARGLTDEERRLLYEQAFQKNKITYHDIRTLLHLPDDTYFKGIVYDRGESRKQNENIRFLELDAYHQIRKAVDKVYGKGKSSSFLPIDFDTFGYALTLFKDDADIHSYLRNEYEQNGKRMPNLANKVYDNELIEELLNLSFTKFGHLSLKALRSILPYMEQGEVYSSACERAGYTFTGPKKKQKTMLLPNIPPIANPVVMRALTQARKVVNAIIKKYGSPVSIHIELARDLSQTFDERRKTKKEQDENRKKNETAIRQLMEYGLTLNPTGHDIVKFKLWSEQNGRCAYSLQPIEIERLLEPGYVEVDHVIPYSRSLDDSYTNKVLVLTRENREKGNRIPAEYLGVGTERWQQFETFVLTNKQFSKKKRDRLLRLHYDENEETEFKNRNLNDTRYISRFFANFIREHLKFAESDDKQKVYTVNGRVTAHLRSRWEFNKNREESDLHHAVDAVIVACTTPSDIAKVTAFYQRREQNKELAKKTEPHFPQPWPHFADELRARLSKHPKESIKALNLGNYDDQKLESLQPVFVSRMPKRSVTGAAHQETLRRYVGIDERSGKIQTVVKTKLSEIKLDASGHFPMYGKESDPRTYEAIRQRLLEHNNDPKKAFQEPLYKPKKNGEPGPVIRTVKIIDTKNQVIPLNDGKTVAYNSNIVRVDVFEKDGKYYCVPVYTMDIMKGILPNKAIEPNKPYSEWKEMTEDYTFRFSLYPNDLIRIELPREKTVKTAAGEEINVKDVFVYYKTIDSANGGLELISHDHRFSLRGVGSRTLKRFEKYQVDVLGNIYKVRGEKRVGLASSAHSKPGKTIRPLQSTRD

SEQ ID NO: 3281 - protein, 1378 aa, synthetic construct
  source 1..1378: note = Description of Artificial Sequence: Synthetic polypeptide
MDKKYSIGLDIGTNSVGWAVITDEYKVPSKKFKVLGNTDRHSIKKNLIGALLFDSGETAEATRLKRTARRRYTRRKNRICYLQEIFSNEMAKVDDSFFHRLEESFLVEEDKKHERHPIFGNIVDEVAYHEKYPTIYHLRKKLVDSTDKADLRLIYLALAHMIKFRGHFLIEGDLNPDNSDVDKLFIQLVQTYNQLFEENPINASGVDAKAILSARLSKSRKLENLIAQLPGEKKNGLFGNLIALSLGLTPNFKSNFDLAEDAKLQLSKDTYDDDLDNLLAQIGDQYADLFLAAKNLSDAILLSDILRVNTEITKAPLSASMIKRYDEHHQDLTLLKALVRQQLPEKYKEIFFDQSKNGYAGYIDGGASQEEFYKFIKPILEKMDGTEELLVKLKREDLLRKQRTFDNGSIPHQIHLGELHAILRRQEDFYPFLKDNREKIEKILTFRIPYYVGPLARGNSRFAWMTRKSEETITPWNFEEVVDKGASAQSFIERMTNFDKNLPNEKVLPKHSLLYEYFTVYNELTKVKYVTEGMRKPAFLSGEQKKAIVDLLFKTNRKVTVKQLKEDYFKKIECFDSVEISGVEDRFNASLGTYHDLLKIIKDKDFLDNEENEDILEDIVLTLTLFEDREMIEERLKTYAHLFDDKVMKQLKRRRYTGWGRLSRKLINGIRDKQSGKTILDFLKSDGFANRNFMQLIHDDSLTFKEDIQKAQVSGQGDSLHEHIANLAGSPAIKKGILQTVKVVDELVKVMGRHKPENIVIEMARENQTTQKGQKNSRERMKRIEEGIKELGSQILKEHPVENTQLQNEKLYLYYLQNGRDMYVDQELDINRLSDYDVDHIVPQSFLKDDSIDNKVLTRSDKNRGKSDNVPSEEVVKKMKNYWRQLLNAKLITQRKFDNLTKAERGGLSELDKAGFIKRQLVETRQITKHVAQILDSRMNTKYDENDKLIREVKVITLKSKLVSDFRKDFQFYKVREINNYHHAHDAYLNAVVGTALIKKYPKLESEFVYGDYKVYDVRKMIAKSEQEIGKATAKYFFYSNIMNFFKTEITLANGEIRKRPLIETNGETGEIVWDKGRDFATVRKVLSMPQVNIVKKTEIQTVGQNGGLFDDNPKSPLEVTPSKLVPLKKELNPKKYGGYQKPTTAYPVLLITDTKQLIPISVMNKKQFEQNPVKFLRDRGYQQVGKNDFIKLPKYTLVDIGDGIKRLWASSKEIHKGNQLVVSKKSQILLYHAHHLDSDLSNDYLQNHNQQFDVLFNEIISFSKKCKLGKEHIQKIENVYSNKKNSASIEELAESFIKLLGFTQLGATSPFNFLGVKLNQKQYKGKKDYILPCTEGTLIRQSITGLYETRVDLSKIGEDSGGSGGSKRTADGSEFES

SEQ ID NO: 3282 - protein, 1082 aa, synthetic construct
  source 1..1082: note = Description of Artificial Sequence: Synthetic polypeptide
MAAFKPNSINYILGLDIGIASVGWAMVEIDEEENPIRLIDLGVRVFERAEVPKTGDSLAMARRLARSVRRLTRRRAHRLLRTRRLLKREGVLQAANFDENGLIKSLPNTPWQLRAAALDRKLTPLEWSAVLLHLIKHRGYLSQRKNEGETADKELGALLKGVAGNAHALQTGDFRTPAELALNKFEKESGHIRNQRSDYSHTFSRKDLQAELILLFEKQKEFGNPHVSGGLKEGIETLLMTQRPALSGDAVQKMLGHCTFEPAEPKAAKNTYTAERFIWLTKLNNLRILEQGSERPLTDTERATLMDEPYRKSKLTYAQARKLLGLEDTAFFKGLRYGKDNAEASTLMEMKAYHAISRALEKEGLKDKKSPLNLSPELQDEIGTAFSLFKTDEDITGRLKDRIQPEILEALLKHISFDKFVQISLKALRRIVPLMEQGKRYDEACAEIYGDHYGKKNTEEKIYLPPIPADEIRNPVVLRALSQARKVINGVVRRYGSPARIHIETAREVGKSFKDRKEIEKRQEENRKDREKAAAKFREYFPNFVGEPKSKDILKLRLYEQQHGKCLYSGKEINLGRLNEKGYVEIDHALPFSRTWDDSFNNKVLVLGSENQNKGNQTPYEYFNGKDNSREWQEFKARVETSRFPRSKKQRILLQKFDEDGFKERNLNDTRYVNRFLCQFVADRMRLTGKGKKRVFASNGQITNLLRGFWGLRKVRAENDRHHALDAVVVACSTVAMQQKITRFVRYKEMNAFDGKTIDKETGEVLHQKTHFPQPWEFFAQEVMIRVFGKPDGKPEFEEADTLEKLRTLLAEKLSSRPEAVHEYVTPLFVSRAPNRKMSGQGHMETVKSAKRLDEGVSVLRVPLTQLKLKDLEKMVNREREPKLYEALKARLEAHKDDPAKAFAEPFYKYDKAGNRTQQVKAVRVEQVQKTGVWVRNHNGIADNATMVRVDVFEKGDKYYLVPIYSWQVAKGILPDRAVVQGKDEEDWQLIDDSFNFKFSLHPNDLVEVITKKARMFGYFASCHRGTGNINIRIHDLDHKIGKNGILEGIGVKTALSFQKYQIDELGKEIRPCRLKKRPPVR

SEQ ID NO: 3283 - protein, 1375 aa, synthetic construct
  source 1..1375: note = Description of Artificial Sequence: Synthetic polypeptide
MEKKYSIGLDIGTNSVGWAVITDDYKVPSKKFKVLGNTNRKSIKKNLMGALLFDSGETAEATRLKRTARRRYTRRKNRIRYLQEIFANEMAKLDDSFFQRLEESFLVEEDKKNERHPIFGNLADEVAYHRNYPTIYHLRKKLADSPEKADLRLIYLALAHIIKFRGHFLIEGKLNAENSDVAKLFYQLIQTYNQLFEESPLDEIEVDAKGILSARLSKSKRLEKLIAVFPNEKKNGLFGNIIALALGLTPNFKSNFDLTEDAKLQLSKDTYDDDLDELLGQIGDQYADLFSAAKNLSDAILLSDILRSNSEVTKAPLSASMVKRYDEHHQDLALLKTLVRQQFPEKYAEIFKDDTKNGYAGYVGIGIKHRKRTTKLATQEEFYKFIKPILEKMDGAEELLAKLNRDDLLRKQRTFDNGSIPHQIHLKELHAILRRQEEFYPFLKENREKIEKILTFRIPYYVGPLARGNSRFAWLTRKSEEAITPWNFEEVVDKGASAQSFIERMTNFDEQLPNKKVLPKHSLLYEYFTVYNELTKVKYVTERMRKPEFLSGEQKKAIVDLLFKTNRKVTVKQLKEDYFKKIECFDSVEIIGVEDRFNASLGTYHDLLKIIKDKDFLDNEENEDILEDIVLTLTLFEDREMIEERLKTYAHLFDDKVMKQLKRRHYTGWGRLSRKMINGIRDKQSGKTILDFLKSDGFSNRNFMQLIHDDSLTFKEEIEKAQVSGQGDSLHEQIADLAGSPAIKKGILQTVKIVDELVKVMGHKPENIVIEMARENQTTTKGLQQSRERKKRIEEGIKELESQILKENPVENTQLQNEKLYLYYLQNGRDMYVDQELDINRLSDYDVDHIVPQSFIKDDSIDNKVLTRSVENRGKSDNVPSEEVVKKMKNYWRQLLNAKLITQRKFDNLTKAERGGLSEADKAGFIKRQLVETRQITKHVARILDSRMNTKRDKNDKPIREVKVITLKSKLVSDFRKDFQLYKVRDINNYHHAHDAYLNAVVGTALIKKYPKLESEFVYGDYKVYDVRKMIAKSEQEIGKATAKRFFYSNIMNFFKTEVKLANGEIRKRPLIETNGETGEVVWNKEKDFATVRKVLAMPQVNIVKKTEVQTGGFSKESILSKRESAKLIPRKKGWDTRKYGGFGSPTVAYSILVVAKVEKGKAKKLKSVKVLVGITIMEKGSYEKDPIGFLEAKGYKDIKKELIFKLPKYSLFELENGRRRMLASATELQKANELVLPQHLVRLLYYTQNISATTGSNNLGYIEQHREEFKEIFEKIIDFSEKYILKNKVNSNLKSSFDEQFAVSDSILLSNSFVSLLKYTSFGASGGFTFLDLDVKQGRLRYQTVTEVLDATLIYQSITGLYETRTDLSQLGGD

SEQ ID NO: 3284 - protein, 1375 aa, synthetic construct
  source 1..1375: note = Description of Artificial Sequence: Synthetic polypeptide
MEKKYSIGLDIGTNSVGWAVITDDYKVPSKKFKVLGNTNRKSIKKNLMGALLFDSGETAEATRLKRTARRRYTRRKNRIRYLQEIFANEMAKLDDSFFQRLEESFLVEEDKKNERHPIFGNLADEVAYHRNYPTIYHLRKKLADSPEKADLRLIYLALAHIIKFRGHFLIEGKLNAENSDVAKLFYQLIQTYNQLFEESPLDEIEVDAKGILSARLSKSKRLEKLIAVFPNEKKNGLFGNIIALALGLTPNFKSNFDLTEDAKLQLSKDTYDDDLDELLGQIGDQYADLFSAAKNLSDAILLSDILRSNSEVTKAPLSASMVKRYDEHHQDLALLKTLVRQQFPEKYAEIFKDDTKNGYAGYVGADKKLRKRSGKLATEEEFYKFIKPILEKMDGAEELLAKLNRDDLLRKQRTFDNGSIPHQIHLKELHAILRRQEEFYPFLKENREKIEKILTFRIPYYVGPLARGNSRFAWLTRKSEEAITPWNFEEVVDKGASAQSFIERMTNFDEQLPNKKVLPKHSLLYEYFTVYNELTKVKYVTERMRKPEFLSGEQKKAIVDLLFKTNRKVTVKQLKEDYFKKIECFDSVEIIGVEDRFNASLGTYHDLLKIIKDKDFLDNEENEDILEDIVLTLTLFEDREMIEERLKTYAHLFDDKVMKQLKRRHYTGWGRLSRKMINGIRDKQSGKTILDFLKSDGFSNANFMQLIHDDSLTFKEEIEKAQVSGQGDSLHEQIADLAGSPAIKKGILQTVKIVDELVKVMGHKPENIVIEMARENQTTTKGLQQSRERKKRIEEGIKELESQILKENPVENTQLQNEKLYLYYLQNGRDMYVDQELDINRLSDYDVDHIVPQSFIKDDSIDNKVLTRSVENRGKSDNVPSEEVVKKMKNYWRQLLNAKLITQRKFDNLTKAERGGLSEADKAGFIKRQLVETRQITKHVARILDSRMNTKRDKNDKPIREVKVITLKSKLVSDFRKDFQLYKVRDINNYHHAHDAYLNAVVGTALIKKYPKLESEFVYGDYKVYDVRKMIAKSEQEIGKATAKRFFYSNIMNFFKTEVKLANGEIRKRPLIETNGETGEVVWNKEKDFATVRKVLAMPQVNIVKKTEVQTGGFSKESILSKRESAKLIPRKKGWDTRKYGGFGSPTVAYSILVVAKVEKGKAKKLKSVKVLVGITIMEKGSYEKDPIGFLEAKGYKDIKKELIFKLPKYSLFELENGRRRMLASAKELQKANELVLPQHLVRLLYYTQNISATTGSNNLGYIEQHREEFKEIFEKIIDFSEKYILKNKVNSNLKSSFDEQFAVSDSILLSNSFVSLLKYTSFGASGGFTFLDLDVKQGRLRYQTVTEVLDATLIYQSITGLYETRTDLSQLGGD

SEQ ID NO: 3285 - protein, 1368 aa, synthetic construct
  source 1..1368: note = Description of Artificial Sequence: Synthetic polypeptide
MDKKYSIGLDIGTNSVGWAVITDEYKVPSKKFKVLGNTDRHSIKKNLIGALLFDSGETAEATRLKRTARRRYTRRKNRICYLQEIFSNEMAKVDDSFFHRLEESFLVEEDKKHERHPIFGNIVDEVAYHEKYPTIYHLRKKLVDSTDKADLRLIYLALAHMIKFRGHFLIEGDLNPDNSDVDKLFIQLVQTYNQLFEENPINASGVDAKAILSARLSKSRRLENLIAQLPGEKKNGLFGNLIALSLGLTPNFKSNFDLAEDAKLQLSKDTYDDDLDNLLAQIGDQYADLFLAAKNLSDAILLSDILRVNTEITKAPLSASMVKRYDEHHQDLTLLKALVRQQLPEKYKEIFFDQSKNGYAGYIDGGASQEEFYKFIKPILEKMDGTEELLVKLNREDLLRKQRTFDNGIIPHQIHLGELHAILRRQGDFYPFLKDNREKIEKILTFRIPYYVGPLARGNSRFAWMTRKSEETITPWNFEEVVDKGASAQSFIERMTNFDKNLPNEKVLPKHSLLYEYFTVYNELTKVKYVTEGMRKPAFLSGEQKKAIVDLLFKTNRKVTVKQLKEDYFKKIECFDSVEISGVEDRFNASLGTYHDLLKIIKDKDFLDNEENEDILEDIVLTLTLFEDREMIEERLKTYAHLFDDKVMKQLKRLRYTGWGRLSRKLINGIRDKQSGKTILDFLKSDGFANRNFMQLIHDDSLTFKEDIQKAQVSGQGDSLHEHIANLAGSPAIKKGILQTVKVVDELVKVMGGHKPENIVIEMARENQTTQKGQKNSRERMKRIEEGIKELGSQILKEHPVENTQLQNEKLYLYYLQNGRDMYVDQELDINRLSDYDVDHIVPQSFLKDDSIDNKVLTRSDKNRGKSDNVPSEEVVKKMKNYWRQLLNAKLITQRKFDNLTKAERGGLSELDKAGFIKRQLVETRQITKHVAQILDSRMNTKYDENDKLIREVKVITLKSKLVSDFRKDFQFYKVREINNYHHAHDAYLNAVVGTALIKKYPKLESEFVYGDYKVYDVRKMIAKSEQEIGKATAKYFFYSNIMNFFKTEITLANGEIRKRPLIETNGETGEIVWDKGRDFATVRKVLSMPQVNIVKKTEVQTGGFSKESILPKGNSDKLIARKKDWDPKKYGGFNSPTAAYSVLVVAKVEKGKSKKLKSVKELLGITIMERSSFEKNPIGFLEAKGYKEVKKDLIIKLPKYSLFELENGRKRMLASAGVLHKGNELALPSKYVNFLYLASHYEKLKGSPEDNEQKQLFVEQHKHYLDEIIEQISEFSKRVILADANLDKVLSAYNKHRDKPIREQAENIIHLFTLTNLGVPAAFKYFDTTIDKKRYTSTKEVLDATLIHQSITGLYETRIDLSQLGGD

SEQ ID NO: 3286 - protein, 1368 aa, synthetic construct
  source 1..1368: note = Description of Artificial Sequence: Synthetic polypeptide
MDKKYSIGLDIGTNSVGWAVITDEYKVPSKKFKVLGNTDRHSIKKNLIGALLFDSGETAEATRLKRTARRRYTRRKNRICYLQEIFSNEMAKVDDSFFHRLEESFLVEEDKKHERHPIFGNIVDEVAYHEKYPTIYHLRKKLVDSTDKADLRLIYLALAHMIKFRGHFLIEGDLNPDNSDVDKLFIQLVQTYNQLFEENPINASGVDAKAILSARLSKSRRLENLIAQLPGEKKNGLFGNLIALSLGLTPNFKSNFDLAEDAKLQLSKDTYDDDLDNLLAQIGDQYADLFLAAKNLSDAILLSDILRVNTEITKAPLSASMVKRYDEHHQDLTLLKALVRQQLPEKYKEIFFDQSKNGYAGYIDGGASQEEFYKFIKPILEKMDGTEELLVKLNREDLLRKQRTFDNGIIPHQIHLGELHAILRRQGDFYPFLKDNREKIEKILTFRIPYYVGPLARGNSRFAWMTRKSEETITPWNFEEVVDKGASAQSFIERMTNFDKNLPNEKVLPKHSLLYEYFTVYNELTKVKYVTEGMRKPAFLSGEQKKAIVDLLFKTNRKVTVKQLKEDYFKKIECFDSVEISGVEDRFNASLGTYHDLLKIIKDKDFLDNEENEDILEDIVLTLTLFEDREMIEERLKTYAHLFDDKVMKQLKRLRYTGWGRLSRKLINGIRDKQSGKTILDFLKSDGFANRNFMQLIHDDSLTFKEDIQKAQVSGQGDSLHEHIANLAGSPAIKKGILQTVKVVDELVKVMGGHKPENIVIEMARENQTTQKGQKNSRERMKRIEEGIKELGSQILKEHPVENTQLQNEKLYLYYLQNGRDMYVDQELDINRLSDYDVDHIVPQSFLKDDSIDNKVLTRSDKNRGKSDNVPSEEVVKKMKNYWRQLLNAKLITQRKFDNLTKAERGGLSELDKAGFIKRQLVETRQITKHVAQILDSRMNTKYDENDKLIREVKVITLKSKLVSDFRKDFQFYKVREINNYHHAHDAYLNAVVGTALIKKYPKLESEFVYGDYKVYDVRKMIAKSEQEIGKATAKYFFYSNIMNFFKTEITLANGEIRKRPLIETNGETGEIVWDKGRDFATVRKVLSMPQVNIVKKTEVQTGGFSKESILPKGNSDKLIARKKDWDPKKYGGFNSPTVAYSVLVVAKVEKGKSKKLKSVKELLGITIMERSSFEKNPIGFLEAKGYKEVKKDLIIKLPKYSLFELENGRKRMLASASVLHKGNELALPSKYVNFLYLASHYEKLKGSSEDNKQKQLFVEQHKHYLDEIIEQISEFSKRVILADANLDKVLSAYNKHRDKPIREQAENIIHLFTLTNLGASAAFKYFDTTIGRKLYTSTKEVLDATLIHQSITGLYETRIDLSQLGGD

SEQ ID NO: 3287 - protein, 1368 aa, synthetic construct
  source 1..1368: note = Description of Artificial Sequence: Synthetic polypeptide
MDKKYSIGLDIGTNSVGWAVITDEYKVPSKKFKVLGNTDRHSIKKNLIGALLFDSGETAEATRLKRTARRRYTRRKNRICYLQEIFSNEMAKVDDSFFHRLEESFLVEEDKKHERHPIFGNIVDEVAYHEKYPTIYHLRKKLVDSTDKADLRLIYLALAHMIKFRGHFLIEGDLNPDNSDVDKLFIQLVQTYNQLFEENPINASGVDAKAILSARLSKSRRLENLIAQLPGEKKNGLFGNLIALSLGLTPNFKSNFDLAEDAKLQLSKDTYDDDLDNLLAQIGDQYADLFLAAKNLSDAILLSDILRVNTEITKAPLSASMVKRYDEHHQDLTLLKALVRQQLPEKYKEIFFDQSKNGYAGYIDGGASQEEFYKFIKPILEKMDGTEELLVKLNREDLLRKQRTFDNGIIPHQIHLGELHAILRRQGDFYPFLKDNREKIEKILTFRIPYYVGPLARGNSRFAWMTRKSEETITPWNFEEVVDKGASAQSFIERMTNFDKNLPNEKVLPKHSLLYEYFTVYNELTKVKYVTEGMRKPAFLSGEQKKAIVDLLFKTNRKVTVKQLKEDYFKKIECFDSVEISGVEDRFNASLGTYHDLLKIIKDKDFLDNEENEDILEDIVLTLTLFEDREMIEERLKTYAHLFDDKVMKQLKRLRYTGWGRLSRKLINGIRDKQSGKTILDFLKSDGFANRNFMQLIHDDSLTFKEDIQKAQVSGQGDSLHEHIANLAGSPAIKKGILQTVKVVDELVKVMGGHKPENIVIEMARENQTTQKGQKNSRERMKRIEEGIKELGSQILKEHPVENTQLQNEKLYLYYLQNGRDMYVDQELDINRLSDYDVDHIVPQSFLKDDSIDNKVLTRSDKNRGKSDNVPSEEVVKKMKNYWRQLLNAKLITQRKFDNLTKAERGGLSELDKAGFIKRQLVETRQITKHVAQILDSRMNTKYDENDKLIREVKVITLKSKLVSDFRKDFQFYKVREINNYHHAHDAYLNAVVGTALIKKYPKLESEFVYGDYKVYDVRKMIAKSEQEIGKATAKYFFYSNIMNFFKTEITLANGEIRKRPLIETNGETGEIVWDKGRDFATVRKVLSMPQVNIVKKTEVQTGGFSKESILPKGNSDKLIARKKDWDPKKYGGFNSPTVAYSVLVVAKVEKGKSKKLKSVKELLGITIMERSSFEKNPIDFLEAKGYKEVKKDLIIKLPKYSLFELENGRKRMLASAGVLQKGNELALPSKYVNFLYLASHYEKLKGSPEDNEQKQLFVEQHKHYLDEIIEQISEFSKRVILADANLDKVLSAYNKHRDKPIREQAENIIHLFTLTNLGAPAAFKYFDTTINRKQYNTTKEVLDATLIRQSITGLYETRIDLSQLGGD

SEQ ID NO: 3288 - protein, 1368 aa, synthetic construct
  source 1..1368: note = Description of Artificial Sequence: Synthetic polypeptide
MDKKYSIGLDIGTNSVGWAVITDEYKVPSKKFKVLGNTDRHSIKKNLIGALLFDSGETAEATRLKRTARRRYTRRKNRICYLQEIFSNEMAKVDDSFFHRLEESFLVEEDKKHERHPIFGNIVDEVAYHEKYPTIYHLRKKLVDSTDKADLRLIYLALAHMIKFRGHFLIEGDLNPDNSDVDKLFIQLVQTYNQLFEENPINASGVDAKAILSARLSKSRRLENLIAQLPGEKKNGLFGNLIALSLGLTPNFKSNFDLAEDAKLQLSKDTYDDDLDNLLAQIGDQYADLFLAAKNLSDAILLSDILRVNTEITKAPLSASMIKRYDEHHQDLTLLKALVRQQLPEKYKEIFFDQSKNGYAGYIDGGASQEEFYKFIKPILEKMDGTEELLVKLNREDLLRKQRTFDNGSIPHQIHLGELHAILRRQEDFYPFLKDNREKIEKILTFRIPYYVGPLARGNSRFAWMTRKSEETITPWNFEEVVDKGASAQSFIERMTNFDKNLPNEKVLPKHSLLYEYFTVYNELTKVKYVTEGMRKPAFLSGEQKKAIVDLLFKTNRKVTVKQLKEDYFKKIECFDSVEISGVEDRFNASLGTYHDLLKIIKDKDFLDNEENEDILEDIVLTLTLFEDREMIEERLKTYAHLFDDKVMKQLKRRRYTGWGRLSRKLINGIRDKQSGKTILDFLKSDGFANRNFMQLIHDDSLTFKEDIQKAQVSGQGDSLHEHIANLAGSPAIKKGILQTVKVVDELVKVMGRHKPENIVIEMARENQTTQKGQKNSRERMKRIEEGIKELGSQILKEHPVENTQLQNEKLYLYYLQNGRDMYVDQELDINRLSDYDVDHIVPQSFLKDDSIDNKVLTRSDKNRGKSDNVPSEEVVKKMKNYWRQLLNAKLITQRKFDNLTKAERGGLSELDKAGFIKRQLVETRQITKHVAQILDSRMNTKYDENDKLIREVKVITLKSKLVSDFRKDFQFYKVREINNYHHAHDAYLNAVVGTALIKKYPKLESEFVYGDYKVYDVRKMIAKSEQEIGKATAKYFFYSNIMNFFKTEITLANGEIRKRPLIETNGETGEIVWDKGRDFATVRKVLSMPQVNIVKKTEVQTGGFSKESILPKRNSDKLIARKKDWDPKKYGGFDSPTVAYSVLVVAKVEKGKSKKLKSVKELLGITIMERSSFEKNPIDFLEAKGYKEVKKDLIIKLPKYSLFELENGRKRMLASARELQKGNELALPSKYVNFLYLASHYEKLKGSPEDNEQKQLFVEQHKHYLDEIIEQISEFSKRVILADAQLDKVLSAYNKHRDKPIREQAENIIHLFTLTNLGAPAAFKYFDTTFKQKQYRSTKEVLDATLIHQSITGLYETRIDLSQLGGD

SEQ ID NO: 3289 - protein, 1368 aa, synthetic construct
  source 1..1368: note = Description of Artificial Sequence: Synthetic polypeptide
MDKKYSIGLDIGTNSVGWAVITDEYKVPSKKFKVLGNTDRHSIKKNLIGALLFDSGETAEATRLKRTARRRYTRRKNRICYLQEIFSNEMAKVDDSFFHRLEESFLVEEDKKHERHPIFGNIVDEVAYHEKYPTIYHLRKKLVDSTDKADLRLIYLALAHMIKFRGHFLIEGDLNPDNSDVDKLFIQLVQTYNQLFEENPINASGVDAKAILSARLSKSRRLENLIAQLPGEKKNGLFGNLIALSLGLTPNFKSNFDLAEDAKLQLSKDTYDDDLDNLLAQIGDQYADLFLAAKNLSDAILLSDILRVNTEITKAPLSASMIKRYDEHHQDLTLLKALVRQQLPEKYKEIFFDQSKNGYAGYIDGGASQEEFYKFIKPILEKMDGTEELLVKLNREDLLRKQRTFDNGSIPHQIHLGELHAILRRQEDFYPFLKDNREKIEKILTFRIPYYVGPLARGNSRFAWMTRKSEETITPWNFEEVVDKGASAQSFIERMTNFDKNLPNEKVLPKHSLLYEYFTVYNELTKVKYVTEGMRKPAFLSGEQKKAIVDLLFKTNRKVTVKQLKEDYFKKIECFDSVEISGVEDRFNASLGTYHDLLKIIKDKDFLDNEENEDILEDIVLTLTLFEDREMIEERLKTYAHLFDDKVMKQLKRRRYTGWGRLSRKLINGIRDKQSGKTILDFLKSDGFANRNFMQLIHDDSLTFKEDIQKAQVSGQGDSLHEHIANLAGSPAIKKGILQTVKVVDELVKVMGRHKPENIVIEMARENQTTQKGQKNSRERMKRIEEGIKELGSQILKEHPVENTQLQNEKLYLYYLQNGRDMYVDQELDINRLSDYDVDHIVPQSFLKDDSIDNKVLTRSDKNRGKSDNVPSEEVVKKMKNYWRQLLNAKLITQRKFDNLTKAERGGLSELDKAGFIKRQLVETRQITKHVAQILDSRMNTKYDENDKLIREVKVITLKSKLVSDFRKDFQFYKVREINNYHHAHDAYLNAVVGTALIKKYPKLESEFVYGDYKVYDVRKMIAKSEQEIGKATAKYFFYSNIMNFFKTEITLANGEIRKRPLIETNGETGEIVWDKGRDFATVRKVLSMPQVNIVKKTEVQTGGFSKESILPKRNSDKLIARKKDWDPKKYGGFLWPTVAYSVLVVAKVEKGKSKKLKSVKELLGITIMERSSFEKNPIDFLEAKGYKEVKKDLIIKLPKYSLFELENGRKRMLASAKQLQKGNELALPSKYVNFLYLASHYEKLKGSPEDNEQKQLFVEQHKHYLDEIIEQISEFSKRVILADANLDKVLSAYNKHRDKPIREQAENIIHLFTLTNLGAPAAFKYFDTTIDRKQYRSTKEVLDATLIHQSITGLYETRIDLSQLGGD

SEQ ID NO: 3290 - protein, 1368 aa, synthetic construct
  source 1..1368: note = Description of Artificial Sequence: Synthetic polypeptide
MDKKYSIGLDIGTNSVGWAVITDEYKVPSKKFKVLGNTDRHSIKKNLIGALLFDSGETAEATRLKRTARRRYTRRKNRICYLQEIFSNEMAKVDDSFFHRLEESFLVEEDKKHERHPIFGNIVDEVAYHEKYPTIYHLRKKLVDSTDKADLRLIYLALAHMIKFRGHFLIEGDLNPDNSDVDKLFIQLVQTYNQLFEENPINASGVDAKAILSARLSKSRRLENLIAQLPGEKKNGLFGNLIALSLGLTPNFKSNFDLAEDAKLQLSKDTYDDDLDNLLAQIGDQYADLFLAAKNLSDAILLSDILRVNTEITKAPLSASMIKRYDEHHQDLTLLKALVRQQLPEKYKEIFFDQSKNGYAGYIDGGASQEEFYKFIKPILEKMDGTEELLVKLNREDLLRKQRTFDNGSIPHQIHLGELHAILRRQEDFYPFLKDNREKIEKILTFRIPYYVGPLARGNSRFAWMTRKSEETITPWNFEEVVDKGASAQSFIERMTNFDKNLPNEKVLPKHSLLYEYFTVYNELTKVKYVTEGMRKPAFLSGEQKKAIVDLLFKTNRKVTVKQLKEDYFKKIECFDSVEISGVEDRFNASLGTYHDLLKIIKDKDFLDNEENEDILEDIVLTLTLFEDREMIEERLKTYAHLFDDKVMKQLKRRRYTGWGRLSRKLINGIRDKQSGKTILDFLKSDGFANRNFMQLIHDDSLTFKEDIQKAQVSGQGDSLHEHIANLAGSPAIKKGILQTVKVVDELVKVMGRHKPENIVIEMARENQTTQKGQKNSRERMKRIEEGIKELGSQILKEHPVENTQLQNEKLYLYYLQNGRDMYVDQELDINRLSDYDVDHIVPQSFLKDDSIDNKVLTRSDKNRGKSDNVPSEEVVKKMKNYWRQLLNAKLITQRKFDNLTKAERGGLSELDKAGFIKRQLVETRQITKHVAQILDSRMNTKYDENDKLIREVKVITLKSKLVSDFRKDFQFYKVREINNYHHAHDAYLNAVVGTALIKKYPKLESEFVYGDYKVYDVRKMIAKSEQEIGKATAKYFFYSNIMNFFKTEITLANGEIRKRPLIETNGETGEIVWDKGRDFATVRKVLSMPQVNIVKKTEVQTGGFSKESILPKRNSDKLIARKKDWDPKKYGGFVSPTVAYSVLVVAKVEKGKSKKLKSVKELLGITIMERSSFEKNPIDFLEAKGYKEVKKDLIIKLPKYSLFELENGRKRMLASAGELQKGNELALPSKYVNFLYLASHYEKLKGSPEDNEQKQLFVEQHKHYLDEIIEQISEFSKRVILADANLDKVLSAYNKHRDKPIREQAENIIHLFTLTNLGAPAAFKYFDTTIDRKQYRSTKEVLDATLIHQSITGLYETRIDLSQLGGD

SEQ ID NO: 3291 - protein, 1368 aa, synthetic construct
  source 1..1368: note = Description of Artificial Sequence: Synthetic polypeptide
MDKKYSIGLDIGTNSVGWAVITDEYKVPSKKFKVLGNTDRHSIKKNLIGALLFDSGETAEATRLKRTARRRYTRRKNRICYLQEIFSNEMAKVDDSFFHRLEESFLVEEDKKHERHPIFGNIVDEVAYHEKYPTIYHLRKKLVDSTDKADLRLIYLALAHMIKFRGHFLIEGDLNPDNSDVDKLFIQLVQTYNQLFEENPINASGVDAKAILSARLSKSRRLENLIAQLPGEKKNGLFGNLIALSLGLTPNFKSNFDLAEDAKLQLSKDTYDDDLDNLLAQIGDQYADLFLAAKNLSDAILLSDILRVNTEITKAPLSASMIKRYDEHHQDLTLLKALVRQQLPEKYKEIFFDQSKNGYAGYIDGGASQEEFYKFIKPILEKMDGTEELLVKLNREDLLRKQRTFDNGSIPHQIHLGELHAILRRQEDFYPFLKDNREKIEKILTFRIPYYVGPLARGNSRFAWMTRKSEETITPWNFEEVVDKGASAQSFIERMTNFDKNLPNEKVLPKHSLLYEYFTVYNELTKVKYVTEGMRKPAFLSGEQKKAIVDLLFKTNRKVTVKQLKEDYFKKIECFDSVEISGVEDRFNASLGTYHDLLKIIKDKDFLDNEENEDILEDIVLTLTLFEDREMIEERLKTYAHLFDDKVMKQLKRRRYTGWGRLSRKLINGIRDKQSGKTILDFLKSDGFANRNFMQLIHDDSLTFKEDIQKAQVSGQGDSLHEHIANLAGSPAIKKGILQTVKVVDELVKVMGRHKPENIVIEMARENQTTQKGQKNSRERMKRIEEGIKELGSQILKEHPVENTQLQNEKLYLYYLQNGRDMYVDQELDINRLSDYDVDHIVPQSFLKDDSIDNKVLTRSDKNRGKSDNVPSEEVVKKMKNYWRQLLNAKLITQRKFDNLTKAERGGLSELDKAGFIKRQLVETRQITKHVAQILDSRMNTKYDENDKLIREVKVITLKSKLVSDFRKDFQFYKVREINNYHHAHDAYLNAVVGTALIKKYPKLESEFVYGDYKVYDVRKMIAKSEQEIGKATAKYFFYSNIMNFFKTEITLANGEIRKRPLIETNGETGEIVWDKGRDFATVRKVLSMPQVNIVKKTEVQTGGFSKESILPKRNSDKLIARKKDWDPKKYGGFVSPTVAYSVLVVAKVEKGKSKKLKSVKELLGITIMERSSFEKNPIDFLEAKGYKEVKKDLIIKLPKYSLFELENGRKRMLASARELQKGNELALPSKYVNFLYLASHYEKLKGSPEDNEQKQLFVEQHKHYLDEIIEQISEFSKRVILADANLDKVLSAYNKHRDKPIREQAENIIHLFTLTNLGAPAAFKYFDTTIDRKEYRSTKEVLDATLIHQSITGLYETRIDLSQLGGD

SEQ ID NO: 3292 - protein, 1368 aa, synthetic construct
  source 1..1368: note = Description of Artificial Sequence: Synthetic polypeptide
MDKKYSIGLDIGTNSVGWAVITDEYKVPSKKFKVLGNTDRHSIKKNLIGALLFDSGETAEATRLKRTARRRYTRRKNRICYLQEIFSNEMAKVDDSFFHRLEESFLVEEDKKHERHPIFGNIVDEVAYHEKYPTIYHLRKKLVDSTDKADLRLIYLALAHMIKFRGHFLIEGDLNPDNSDVDKLFIQLVQTYNQLFEENPINASGVDAKAILSARLSKSRRLENLIAQLPGEKKNGLFGNLIALSLGLTPNFKSNFDLAEDTKLQLSKDTYDDDLDNLLAQIGDQYADLFLAAKNLSDAILLSDILRVNTEITKAPLSASMIKLYDEHHQDLTLLKALVRQQLPEKYKEIFFDQSKNGYAGYIDGGASQEEFYKFIKPILEKMDGTEELLVKLNREDLLRKQRTFDNGIIPHQIHLGELHAILRRQEDFYPFLKDNREKIEKILTFRIPYYVGPLARGNSRFAWMTRKSEETITPWNFEKVVDKGASAQSFIERMTNFDKNLPNEKVLPKHSLLYEYFTVYNELTKVKYVTEGMRKPAFLSGDQKKAIVDLLFKTNRKVTVKQLKEDYFKKIECFDSVEISGVEDRFNASLGTYHDLLKIIKDKDFLDNEENEDILEDIVLTLTLFEDREMIEERLKTYAHLFDDKVMKQLKRRRYTGWGRLSRKLINGIRDKQSGKTILDFLKSDGFANRNFIQLIHDDSLTFKEDIQKAQVSGQGDSLHEHIANLAGSPAIKKGILQTVKVVDELVKVMGRHKPENIVIEMARENQTTQKGQKNSRERMKRIEEGIKELGSQILKEHPVENTQLQNEKLYLYYLQNGRDMYVDQELDINRLSDYDVDHIVPQSFLKDDSIDNKVLTRSDKNRGKSDNVPSEEVVKKMKNYWRQLLNAKLITQRKFDNLTKAERGGLSELDKAGFIKRQLVETRQITKHVAQILDSRMNTKYDENDKLIREVKVITLKSKLVSDFRKDFQFYKVREINNYHHAHDAYLNAVVGTALIKKYPKLESEFVYGDYKVYDVRKMIAKSEQEIGKATAKYFFYSNIMNFFKTEITLANGEIRKRPLIETNGETGEIVWDKGRDFATVRKVLSMPQVNIVKKTEVQTGGFSKESILPKRNSDKLIARKKDWDPKKYGGFDSPTVAYSVLVVAKVEKGKSKKLKSVKELLGITIMERSSFEKNPIDFLEAKGYKEVKKDLIIKLPKYSLFELENGRKRMLASAGVLQKGNELALPSKYVNFLYLASHYEKLKGSPEDNEQKQLFVEQHKHYLDEIIEQISEFSKRVILADANLDKVLSAYNKHRDKPIREQAENIIHLFTLTNLGAPAAFKYFDTTIDRKRYTSTKEVLDATLIHQSITGLYETRIDLSQLGGD

SEQ ID NO: 3293 - protein, 1368 aa, synthetic construct
  source 1..1368: note = Description of Artificial Sequence: Synthetic polypeptide
MDKKYSIGLDIGTNSVGWAVITDEYKVPSKKFKVLGNTDRHSIKKNLIGALLFDSGETAEATRLKRTARRRYTRRKNRICYLQEIFSNEMAKVDDSFFHRLEESFLVEEDKKHERHPIFGNIVDEVAYHEKYPTIYHLRKKLVDSTDKADLRLIYLALAHMIKFRGHFLIEGDLNPDNSDVDKLFIQLVQTYNQLFEENPINASGVDAKAILSARLSKSRRLENLIAQLPGEKKNGLFGNLIALSLGLTPNFKSNFDLAEDTKLQLSKDTYDDDLDNLLAQIGDQYADLFLAAKNLSDAILLSDILRVNTEITKAPLSASMIKLYDEHHQDLTLLKALVRQQLPEKYKEIFFDQSKNGYAGYIDGGASQEEFYKFIKPILEKMDGTEELLVKLNREDLLRKQRTFDNGIIPHQIHLGELHAILRRQEDFYPFLKDNREKIEKILTFRIPYYVGPLARGNSRFAWMTRKSEETITPWNFEKVVDKGASAQSFIERMTNFDKNLPNEKVLPKHSLLYEYFTVYNELTKVKYVTEGMRKPAFLSGDQKKAIVDLLFKTNRKVTVKQLKEDYFKKIECFDSVEISGVEDRFNASLGTYHDLLKIIKDKDFLDNEENEDILEDIVLTLTLFEDREMIEERLKTYAHLFDDKVMKQLKRRRYTGWGRLSRKLINGIRDKQSGKTILDFLKSDGFANRNFIQLIHDDSLTFKEDIQKAQVSGQGDSLHEHIANLAGSPAIKKGILQTVKVVDELVKVMGRHKPENIVIEMARENQTTQKGQKNSRERMKRIEEGIKELGSQILKEHPVENTQLQNEKLYLYYLQNGRDMYVDQELDINRLSDYDVDHIVPQSFLKDDSIDNKVLTRSDKNRGKSDNVPSEEVVKKMKNYWRQLLNAKLITQRKFDNLTKAERGGLSELDKAGFIKRQLVETRQITKHVAQILDSRMNTKYDENDKLIREVKVITLKSKLVSDFRKDFQFYKVREINNYHHAHDAYLNAVVGTALIKKYPKLESEFVYGDYKVYDVRKMIAKSEQEIGKATAKYFFYSNIMNFFKTEITLANGEIRKRPLIETNGETGEIVWDKGRDFATVRKVLSMPQVNIVKKTEVQTGGFSKESIRPKRNSDKLIARKKDWDPKKYGGFVSPTVAYSVLVVAKVEKGKSKKLKSVKELLGITIMERSSFEKNPIDFLEAKGYKEVKKDLIIKLPKYSLFELENGRKRMLASARFLQKGNELALPSKYVNFLYLASHYEKLKGSPEDNEQKQLFVEQHKHYLDEIIEQISEFSKRVILADANLDKVLSAYNKHRDKPIREQAENIIHLFTLTNLGAPRAFKYFDTTIDRKVYRSTKEVLDATLIHQSITGLYETRIDLSQLGGD

SEQ ID NO: 3294 - protein, 1122 aa, synthetic construct
  source 1..1122: note = Description of Artificial Sequence: Synthetic polypeptide
MSDLVLGLDIGIGSVGVGILNKVTGEIIHKNSRIFPAAQAENNLVRRTNRQGRRLARRKKHRRVRLNRLFEESGLITDFTKISINLNPYQLRVKGLTDELSNEELFIALKNMVKHRGISYLDDASDDGNSSVGDYAQIVKENSKQLETKTPGQIQLERYQTYGQLRGDFTVEKDGKKHRLINVFPTSAYRSEALRILQTQQEFNPQITDEFINRYLEILTGKRKYYHGPGNEKSRTDYGRYRTSGETLDNIFGILIGKCTFYPDEFRAAKASYTAQEFNLLNDLNNLTVPTETKKLSKEQKNQIINYVKNEKAMGPAKLFKYIAKLLSCDVADIKGYRIDKSGKAEIHTFEAYRKMKTLETLDIEQMDRETLDKLAYVLTLNTEREGIQEALEHEFADGSFSQKQVDELVQFRKANSSIFGKGWHNFSVKLMMELIPELYETSEEQMTILTRLGKQKTTSSSNKTKYIDEKLLTEEIYNPVVAKSVRQAIKIVNAAIKEYGDFDNIVIEMARETNEDDEKKAIQKIQKANKDEKDAAMLKAANQYNGKAELPHSVFHGHKQLATKIRLWHQQGERCLYTGKTISIHDLINNSNQFEVDHILPLSITFDDSLANKVLVYATANQEKGQRTPYQALDSMDDAWSFRELKAFVRESKTLSNKKKEYLLTEEDISKFDVRKKFIERNLVDTRYASRVVLNALQEHFRAHKIDTKVSVVRGQFTSQLRRHWGIEKTRDTYHHHAVDALIIAASSQLNLWKKQKNTLVSYSEEQLLDIETGELISDDEYKESVFKAPYQHFVDTLKSKEFEDSILFSYQVDSKFNRKISDATIYATRQAKVGKDKKDETYVLGKIKDIYTQDGYDAFMKIYKKDKSKFLMYRHDPQTFEKVIEPILENYPNKQMNEKGKEVPCNPFLKYKEEHGYIRKYSKKGNGPEIKSLKYYDSKLLGNPIDITPENSKNKVVLQSLKPWRTDVYFNKATGKYEILGLKYADLQFEKGTGTYKISQEKYNDIKKKEGVDSDSEFKFTLYKNDLLLVKDTETKEQQLFRFLSRTLPKQKHYVELKPYDKQKFEGGEALIKVLGNVANGGQCIKGLAKSNISIYKVRTDVLGNQHIIKNEGDKPKLDF

SEQ ID NO: 3295 - protein, 1122 aa, synthetic construct
  source 1..1122: note = Description of Artificial Sequence: Synthetic polypeptide
MSDLVLGLDIGIGSVGVGILNKVTGEIIHKNSRIFPAAQAENNLVRRTNRQGRRLARRKKHRRVRLNRLFEESGLITDFTKISINLNPYQLRVKGLTDELSNEELFIALKNMVKHRGISYLDDASDDGNSSVGDYAQIVKENSKQLETKTPGQIQLERYQTYGQLRGDFTVEKDGKKHRLINVFPTSAYRSEALRILQTQQEFNPQITDEFINRYLEILTGKRKYYHGPGNEKSRTDYGRYRTSGETLDNIFGILIGKCTFYPDEFRAAKASYTAQEFNLLNDLNNLTVPTETKKLSKEQKNQIINYVKNEKAMGPAKLFKYIAKLLSCDVADIKGYRIDKSGKAEIHTFEAYRKMKTLETLDIEQMDRETLDKLAYVLTLNTEREGIQEALEHEFADGSFSQKQVDELVQFRKANSSIFGKGWHNFSVKLMMELIPELYETSEEQMTILTRLGKQKTTSSSNKTKYIDEKLLTEEIYNPVVAKSVRQAIKIVNAAIKEYGDFDNIVIEMARETNEDDEKKAIQKIQKANKDEKDAAMLKAANQYNGKAELPHSVFHGHKQLATKIRLWHQQGERCLYTGKTISIHDLINNSNQFEVDHILPLSITFDDSLANKVLVYATANQEKGQRTPYQALDSMDDAWSFRELKAFVRESKTLSNKKKEYLLTEEDISKFDVRKKFIERNLVDTRYASRVVLNALQEHFRAHKIDTKVSVVRGQFTSQLRRHWGIEKTRDTYHHHAVDALIIAASSQLNLWKKQKNTLVSYSEEQLLDIETGELISDDEYKESVFKAPYQHFVDTLKSKEFEDSILFSYQVDSKFNRKISDATIYATRQAKVGKDKKDETYVLGKIKDIYTQDGYDAFMKIYKKDKSKFLMYRHDPQTFEKVIEPILENYPNKQMNEKGKEVPCNPFLKYKEEHGYIRKYSKKGNGPEIKSLKYYDSKLLGNPIDITPENSKNKVVLQSLKPWRTDVYFNKNTGKYEILGLKYADLQFEKKTGTYKISQEKYNGIMKEEGVDSDSEFKFTLYKNDLLLVKDTETKEQQLFRFLSRTMPNVKYYVELKPYSKDKFEKNESLIEILGSADKSGRCIKGLGKSNISIYKVRTDVLGNQHIIKNEGDKPKLDF

SEQ ID NO: 3296 - protein, 1120 aa, synthetic construct
  source 1..1120: note = Description of Artificial Sequence: Synthetic polypeptide
MSDLVLGLDIGIGSVGVGILNKVTGEIIHKNSRIFPAAQAENNLVRRTNRQGRRLARRKKHRRVRLNRLFEESGLITDFTKISINLNPYQLRVKGLTDELSNEELFIALKNMVKHRGISYLDDASDDGNSSVGDYAQIVKENSKQLETKTPGQIQLERYQTYGQLRGDFTVEKDGKKHRLINVFPTSAYRSEALRILQTQQEFNPQITDEFINRYLEILTGKRKYYHGPGNEKSRTDYGRYRTSGETLDNIFGILIGKCTFYPDEFRAAKASYTAQEFNLLNDLNNLTVPTETKKLSKEQKNQIINYVKNEKAMGPAKLFKYIAKLLSCDVADIKGYRIDKSGKAEIHTFEAYRKMKTLETLDIEQMDRETLDKLAYVLTLNTEREGIQEALEHEFADGSFSQKQVDELVQFRKANSSIFGKGWHNFSVKLMMELIPELYETSEEQMTILTRLGKQKTTSSSNKTKYIDEKLLTEEIYNPVVAKSVRQAIKIVNAAIKEYGDFDNIVIEMARETNEDDEKKAIQKIQKANKDEKDAAMLKAANQYNGKAELPHSVFHGHKQLATKIRLWHQQGERCLYTGKTISIHDLINNSNQFEVDHILPLSITFDDSLANKVLVYATANQEKGQRTPYQALDSMDDAWSFRELKAFVRESKTLSNKKKEYLLTEEDISKFDVRKKFIERNLVDTRYASRVVLNALQEHFRAHKIDTKVSVVRGQFTSQLRRHWGIEKTRDTYHHHAVDALIIAASSQLNLWKKQKNTLVSYSEDQLLDIETGELISDDEYKESVFKAPYQHFVDTLKSKEFEDSILFSYQVDSKFNRKISDATIYATRQAKVGKDKADETYVLGKIKDIYTQDGYDAFMKIYKKDKSKFLMYRHDPQTFEKVIEPILENYPNKQINEKGKEVPCNPFLKYKEEHGYIRKYSKKGNGPEIKSLKYYDSKLGNHIDITPKDSNNKVVLQSLKPWRTDVYFNKNTGKYEILGLKYSDMQFEKGTGKYSISKEQYENIKVREGVDENSEFKFTLYKNDLLLLKDSENGEQILLRFTSRNDTSKHYVELKPYNRQKFEGSEYLIKSLGTVAKGGQCIKGLGKSNISIYKVRTDVLGNQHIIKNEGDKPKLDF

SEQ ID NO: 3297 - protein, 1120 aa, synthetic construct
  source 1..1120: note = Description of Artificial Sequence: Synthetic polypeptide
MSDLVLGLDIGIGSVGVGILNKVTGEIIHKNSRIFPAAQAENNLVRRTNRQGRRLARRKKHRRVRLNRLFEESGLITDFTKISINLNPYQLRVKGLTDELSNEELFIALKNMVKHRGISYLDDASDDGNSSVGDYAQIVKENSKQLETKTPGQIQLERYQTYGQLRGDFTVEKDGKKHRLINVFPTSAYRSEALRILQTQQEFNPQITDEFINRYLEILTGKRKYYHGPGNEKSRTDYGRYRTSGETLDNIFGILIGKCTFYPDEFRAAKASYTAQEFNLLNDLNNLTVPTETKKLSKEQKNQIINYVKNEKAMGPAKLFKYIAKLLSCDVADIKGYRIDKSGKAEIHTFEAYRKMKTLETLDIEQMDRETLDKLAYVLTLNTEREGIQEALEHEFADGSFSQKQVDELVQFRKANSSIFGKGWHNFSVKLMMELIPELYETSEEQMTILTRLGKQKTTSSSNKTKYIDEKLLTEEIYNPVVAKSVRQAIKIVNAAIKEYGDFDNIVIEMARETNEDDEKKAIQKIQKANKDEKDAAMLKAANQYNGKAELPHSVFHGHKQLATKIRLWHQQGERCLYTGKTISIHDLINNSNQFEVDHILPLSITFDDSLANKVLVYATANQEKGQRTPYQALDSMDDAWSFRELKAFVRESKTLSNKKKEYLLTEEDISKFDVRKKFIERNLVDTRYASRVVLNALQEHFRAHKIDTKVSVVRGQFTSQLRRHWGIEKTRDTYHHHAVDALIIAASSQLNLWKKQKNTLVSYSEDQLLDIETGELISDDEYKESVFKAPYQHFVDTLKSKEFEDSILFSYQVDSKFNRKISDATIYATRQAKVGKDKADETYVLGKIKDIYTQDGYDAFMKIYKKDKSKFLMYRHDPQTFEKVIEPILENYPNKQINEKGKEVPCNPFLKYKEEHGYIRKYSKKGNGPEIKSLKYYDSKLGNHIDITPKDSNNKVVLQSLKPWRTDVYFNKNTGKYEILGLKYSDMQFEKGTGKYSISKEQYENIKVREGVDENSEFKFTLYKNDLLLLKDSENGEQILLRFTSRNDTSKHYVELKPYNRQKFEGSEYLIKSLGTVVKGGRCIKGLGKSNISIYKVRTDVLGNQHIIKNEGDKPKLDF

SEQ ID NO: 3298 - protein, 6 aa, synthetic construct
  source 1..6: note = Description of Artificial Sequence: Synthetic peptide
GGSGGS

SEQ ID NO: 3299 - protein, 9 aa, synthetic construct
  source 1..9: note = Description of Artificial Sequence: Synthetic peptide
GGSGGSGGS

SEQ ID NO: 3300 - protein, 12 aa, synthetic construct
  source 1..12: note = Description of Artificial Sequence: Synthetic peptide
GGSGGSGGSGGS

SEQ ID NO: 3301 - protein, 15 aa, synthetic construct
  source 1..15: note = Description of Artificial Sequence: Synthetic peptide
GGSGGSGGSGGSGGS

SEQ ID NO: 3302 - protein, 18 aa, synthetic construct
  source 1..18: note = Description of Artificial Sequence: Synthetic peptide
GGSGGSGGSGGSGGSGGS

SEQ ID NO: 3303 - protein, 10 aa, synthetic construct
  source 1..10: note = Description of Artificial Sequence: Synthetic peptide
GGGGSGGGGS

SEQ ID NO: 3304 - protein, 15 aa, synthetic construct
  source 1..15: note = Description of Artificial Sequence: Synthetic peptide
GGGGSGGGGSGGGGS

SEQ ID NO: 3305 - protein, 20 aa, synthetic construct
  source 1..20: note = Description of Artificial Sequence: Synthetic peptide
GGGGSGGGGSGGGGSGGGGS

SEQ ID NO: 3306 - protein, 25 aa, synthetic construct
  source 1..25: note = Description of Artificial Sequence: Synthetic peptide
GGGGSGGGGSGGGGSGGGGSGGGGS

SEQ ID NO: 3307 - protein, 30 aa, synthetic construct
  source 1..30: note = Description of Artificial Sequence: Synthetic polypeptide
GGGGSGGGGSGGGGSGGGGSGGGGSGGGGS

SEQ ID NO: 3308 - protein, 4 aa, synthetic construct
  source 1..4: note = Description of Artificial Sequence: Synthetic peptide
GGGG

SEQ ID NO: 3309 - protein, 5 aa, synthetic construct
  source 1..5: note = Description of Artificial Sequence: Synthetic peptide
GGGGG

SEQ ID NO: 3310 - protein, 6 aa, synthetic construct
  source 1..6: note = Description of Artificial Sequence: Synthetic peptide
GGGGGG

SEQ ID NO: 3311 - protein, 7 aa, synthetic construct
  source 1..7: note = Description of Artificial Sequence: Synthetic peptide
GGGGGGG

SEQ ID NO: 3312 - protein, 8 aa, synthetic construct
  source 1..8: note = Description of Artificial Sequence: Synthetic peptide
GGGGGGGG

SEQ ID NO: 3313 - protein, 9 aa, synthetic construct
  source 1..9: note = Description of Artificial Sequence: Synthetic peptide
GSSGSSGSS

SEQ ID NO: 3314 - protein, 12 aa, synthetic construct
  source 1..12: note = Description of Artificial Sequence: Synthetic peptide
GSSGSSGSSGSS

SEQ ID NO: 3315 - protein, 15 aa, synthetic construct
  source 1..15: note = Description of Artificial Sequence: Synthetic peptide
GSSGSSGSSGSSGSS

SEQ ID NO: 3316 - protein, 18 aa, synthetic construct
  source 1..18: note = Description of Artificial Sequence: Synthetic peptide
GSSGSSGSSGSSGSSGSS

SEQ ID NO: 3317 - protein, 10 aa, synthetic construct
  source 1..10: note = Description of Artificial Sequence: Synthetic peptide
EAAAKEAAAK

SEQ ID NO: 3318 - protein, 15 aa, synthetic construct
  source 1..15: note = Description of Artificial Sequence: Synthetic peptide
EAAAKEAAAKEAAAK

SEQ ID NO: 3319 - protein, 20 aa, synthetic construct
  source 1..20: note = Description of Artificial Sequence: Synthetic peptide
EAAAKEAAAKEAAAKEAAAK

SEQ ID NO: 3320 - protein, 25 aa, synthetic construct
  source 1..25: note = Description of Artificial Sequence: Synthetic peptide
EAAAKEAAAKEAAAKEAAAKEAAAK

SEQ ID NO: 3321 - protein, 30 aa, synthetic construct
  source 1..30: note = Description of Artificial Sequence: Synthetic polypeptide
EAAAKEAAAKEAAAKEAAAKEAAAKEAAAK

SEQ ID NO: 3322 - protein, 5 aa, synthetic construct
  source 1..5: note = Description of Artificial Sequence: Synthetic peptide
PAPAP

SEQ ID NO: 3323 - protein, 7 aa, synthetic construct
  source 1..7: note = Description of Artificial Sequence: Synthetic peptide
PAPAPAP

SEQ ID NO: 3324 - protein, 9 aa, synthetic construct
  source 1..9: note = Description of Artificial Sequence: Synthetic peptide
PAPAPAPAP

SEQ ID NO: 3325 - protein, 11 aa, synthetic construct
  source 1..11: note = Description of Artificial Sequence: Synthetic peptide
PAPAPAPAPAP

SEQ ID NO: 3326 - protein, 13 aa, synthetic construct
  source 1..13: note = Description of Artificial Sequence: Synthetic peptide
PAPAPAPAPAPAP

SEQ ID NO: 3327 - protein, 6 aa, synthetic construct
  source 1..6: note = Description of Artificial Sequence: Synthetic peptide
GGSGGG

SEQ ID NO: 3328 - protein, 6 aa, synthetic construct
  source 1..6: note = Description of Artificial Sequence: Synthetic peptide
GGGGGS

SEQ ID NO: 3329 - protein, 6 aa, synthetic construct
  source 1..6: note = Description of Artificial Sequence: Synthetic peptide
GGSGSS

SEQ ID NO: 3330 - protein, 6 aa, synthetic construct
  source 1..6: note = Description of Artificial Sequence: Synthetic peptide
GSSGGS

SEQ ID NO: 3331 - protein, 8 aa, synthetic construct
  source 1..8: note = Description of Artificial Sequence: Synthetic peptide
GGSEAAAK

SEQ ID NO: 3332 - protein, 8 aa, synthetic construct
  source 1..8: note = Description of Artificial Sequence: Synthetic peptide
EAAAKGGS

SEQ ID NO: 3333 - protein, 6 aa, synthetic construct
  source 1..6: note = Description of Artificial Sequence: Synthetic peptide
GGSPAP

SEQ ID NO: 3334 - protein, 6 aa, synthetic construct
  source 1..6: note = Description of Artificial Sequence: Synthetic peptide
PAPGGS

SEQ ID NO: 3335 - protein, 6 aa, synthetic construct
  source 1..6: note = Description of Artificial Sequence: Synthetic peptide
GGGGSS

SEQ ID NO: 3336 - protein, 6 aa, synthetic construct
  source 1..6: note = Description of Artificial Sequence: Synthetic peptide
GSSGGG

SEQ ID NO: 3337 - protein, 8 aa, synthetic construct
  source 1..8: note = Description of Artificial Sequence: Synthetic peptide
GGGEAAAK

SEQ ID NO: 3338 - protein, 8 aa, synthetic construct
  source 1..8: note = Description of Artificial Sequence: Synthetic peptide
EAAAKGGG

SEQ ID NO: 3339 - protein, 6 aa, synthetic construct
  source 1..6: note = Description of Artificial Sequence: Synthetic peptide
GGGPAP

SEQ ID NO: 3340 - protein, 6 aa, synthetic construct
  source 1..6: note = Description of Artificial Sequence: Synthetic peptide
PAPGGG

SEQ ID NO: 3341 - protein, 8 aa, synthetic construct
  source 1..8: note = Description of Artificial Sequence: Synthetic peptide
GSSEAAAK

SEQ ID NO: 3342 - protein, 8 aa, synthetic construct
  source 1..8: note = Description of Artificial Sequence: Synthetic peptide
EAAAKGSS

SEQ ID NO: 3343 - protein, 6 aa, synthetic construct
  source 1..6: note = Description of Artificial Sequence: Synthetic peptide
GSSPAP

SEQ ID NO: 3344 - protein, 6 aa, synthetic construct
  source 1..6: note = Description of Artificial Sequence: Synthetic peptide
PAPGSS

SEQ ID NO: 3345 - protein, 8 aa, synthetic construct
  source 1..8: note = Description of Artificial Sequence: Synthetic peptide
EAAAKPAP

SEQ ID NO: 3346 - protein, 8 aa, synthetic construct
  source 1..8: note = Description of Artificial Sequence: Synthetic peptide
PAPEAAAK

SEQ ID NO: 3347 - protein, 9 aa, synthetic construct
  source 1..9: note = Description of Artificial Sequence: Synthetic peptide
GGSGGGGSS

SEQ ID NO: 3348 - protein, 9 aa, synthetic construct
  source 1..9: note = Description of Artificial Sequence: Synthetic peptide
GGSGSSGGG

SEQ ID NO: 3349 - protein, 9 aa, synthetic construct
  source 1..9: note = Description of Artificial Sequence: Synthetic peptide
GGGGGSGSS

SEQ ID NO: 3350 - protein, 9 aa, synthetic construct
  source 1..9: note = Description of Artificial Sequence: Synthetic peptide
GGGGSSGGS

SEQ ID NO: 3351 - protein, 9 aa, synthetic construct
  source 1..9: note = Description of Artificial Sequence: Synthetic peptide
GSSGGSGGG

SEQ ID NO: 3352 - protein, 9 aa, synthetic construct
  source 1..9: note = Description of Artificial Sequence: Synthetic peptide
GSSGGGGGS

SEQ ID NO: 3353 - protein, 11 aa, synthetic construct
  source 1..11: note = Description of Artificial Sequence: Synthetic peptide
GGSGGGEAAAK

SEQ ID NO: 3354 - protein, 11 aa, synthetic construct
  source 1..11: note = Description of Artificial Sequence: Synthetic peptide
GGSEAAAKGGG

SEQ ID NO: 3355 - protein, 11 aa, synthetic construct
  source 1..11: note = Description of Artificial Sequence: Synthetic peptide
GGGGGSEAAAK

SEQ ID NO: 3356 - protein, 11 aa, synthetic construct
  source 1..11: note = Description of Artificial Sequence: Synthetic peptide
GGGEAAAKGGS

SEQ ID NO: 3357 - protein, 11 aa, synthetic construct
  source 1..11: note = Description of Artificial Sequence: Synthetic peptide
EAAAKGGSGGG

SEQ ID NO: 3358 - protein, 11 aa, synthetic construct
  source 1..11: note = Description of Artificial Sequence: Synthetic peptide
EAAAKGGGGGS

SEQ ID NO: 3359 - protein, 9 aa, synthetic construct
  source 1..9: note = Description of Artificial Sequence: Synthetic peptide
GGSGGGPAP

SEQ ID NO: 3360 - protein, 9 aa, synthetic construct
  source 1..9: note = Description of Artificial Sequence: Synthetic peptide
GGSPAPGGG

SEQ ID NO: 3361 - protein, 9 aa, synthetic construct
  source 1..9: note = Description of Artificial Sequence: Synthetic peptide
GGGGGSPAP

SEQ ID NO: 3362 - protein, 9 aa, synthetic construct
  source 1..9: note = Description of Artificial Sequence: Synthetic peptide
GGGPAPGGS

SEQ ID NO: 3363 - protein, 9 aa, synthetic construct
  source 1..9: note = Description of Artificial Sequence: Synthetic peptide
PAPGGSGGG

SEQ ID NO: 3364 - protein, 9 aa, synthetic construct
  source 1..9: note = Description of Artificial Sequence: Synthetic peptide
PAPGGGGGS

SEQ ID NO: 3365 - protein, 11 aa, synthetic construct
  source 1..11: note = Description of Artificial Sequence: Synthetic peptide
GGSGSSEAAAK

SEQ ID NO: 3366 - protein, 11 aa, synthetic construct
  source 1..11: note = Description of Artificial Sequence: Synthetic peptide
GGSEAAAKGSS

SEQ ID NO: 3367 - protein, 11 aa, synthetic construct
  source 1..11: note = Description of Artificial Sequence: Synthetic peptide
GSSGGSEAAAK

SEQ ID NO: 3368 - protein, 11 aa, synthetic construct
  source 1..11: note = Description of Artificial Sequence: Synthetic peptide
GSSEAAAKGGS

SEQ ID NO: 3369 - protein, 11 aa, synthetic construct
  source 1..11: note = Description of Artificial Sequence: Synthetic peptide
EAAAKGGSGSS

SEQ ID NO: 3370 - protein, 11 aa, synthetic construct
  source 1..11: note = Description of Artificial Sequence: Synthetic peptide
EAAAKGSSGGS

SEQ ID NO: 3371 - protein, 9 aa, synthetic construct
  source 1..9: note = Description of Artificial Sequence: Synthetic peptide
GGSGSSPAP

SEQ ID NO: 3372 - protein, 9 aa, synthetic construct
  source 1..9: note = Description of Artificial Sequence: Synthetic peptide
GGSPAPGSS

SEQ ID NO: 3373 - protein, 9 aa, synthetic construct
  source 1..9: note = Description of Artificial Sequence: Synthetic peptide
GSSGGSPAP

SEQ ID NO: 3374 - protein, 9 aa, synthetic construct
  source 1..9: note = Description of Artificial Sequence: Synthetic peptide
GSSPAPGGS

SEQ ID NO: 3375 - protein, 9 aa, synthetic construct
  source 1..9: note = Description of Artificial Sequence: Synthetic peptide
PAPGGSGSS

SEQ ID NO: 3376 - protein, 9 aa, synthetic construct
  source 1..9: note = Description of Artificial Sequence: Synthetic peptide
PAPGSSGGS

SEQ ID NO: 3377 - protein, 11 aa, synthetic construct
  source 1..11: note = Description of Artificial Sequence: Synthetic peptide
GGSEAAAKPAP

SEQ ID NO: 3378 - protein, 11 aa, synthetic construct
  source 1..11: note = Description of Artificial Sequence: Synthetic peptide
GGSPAPEAAAK

SEQ ID NO: 3379 - protein, 11 aa, synthetic construct
  source 1..11: note = Description of Artificial Sequence: Synthetic peptide
EAAAKGGSPAP

SEQ ID NO: 3380 - protein, 11 aa, synthetic construct
  source 1..11: note = Description of Artificial Sequence: Synthetic peptide
EAAAKPAPGGS

SEQ ID NO: 3381 - protein, 11 aa, synthetic construct
  source 1..11: note = Description of Artificial Sequence: Synthetic peptide
PAPGGSEAAAK

SEQ ID NO: 3382 - protein, 11 aa, synthetic construct
  source 1..11: note = Description of Artificial Sequence: Synthetic peptide
PAPEAAAKGGS

SEQ ID NO: 3383 - protein, 11 aa, synthetic construct
  source 1..11: note = Description of Artificial Sequence: Synthetic peptide
GGGGSSEAAAK

SEQ ID NO: 3384 - protein, 11 aa, synthetic construct
  source 1..11: note = Description of Artificial Sequence: Synthetic peptide
GGGEAAAKGSS

SEQ ID NO: 3385 - protein, 11 aa, synthetic construct
  source 1..11: note = Description of Artificial Sequence: Synthetic peptide
GSSGGGEAAAK

SEQ ID NO: 3386 - protein, 11 aa, synthetic construct
  source 1..11: note = Description of Artificial Sequence: Synthetic peptide
GSSEAAAKGGG

SEQ ID NO: 3387 - protein, 11 aa, synthetic construct
  source 1..11: note = Description of Artificial Sequence: Synthetic peptide
EAAAKGGGGSS

SEQ ID NO: 3388 - protein, 11 aa, synthetic construct
  source 1..11: note = Description of Artificial Sequence: Synthetic peptide
EAAAKGSSGGG

SEQ ID NO: 3389 - protein, 9 aa, synthetic construct
  source 1..9: note = Description of Artificial Sequence: Synthetic peptide
GGGGSSPAP

SEQ ID NO: 3390 - protein, 9 aa, synthetic construct
  source 1..9: note = Description of Artificial Sequence: Synthetic peptide
GGGPAPGSS

SEQ ID NO: 3391 - protein, 9 aa, synthetic construct
  source 1..9: note = Description of Artificial Sequence: Synthetic peptide
GSSGGGPAP

SEQ ID NO: 3392 - protein, 9 aa, synthetic construct
  source 1..9: note = Description of Artificial Sequence: Synthetic peptide
GSSPAPGGG

SEQ ID NO: 3393 - protein, 9 aa, synthetic construct
  source 1..9: note = Description of Artificial Sequence: Synthetic peptide
PAPGGGGSS

SEQ ID NO: 3394 - protein, 9 aa, synthetic construct
  source 1..9: note = Description of Artificial Sequence: Synthetic peptide
PAPGSSGGG

SEQ ID NO: 3395 - protein, 11 aa, synthetic construct
  source 1..11: note = Description of Artificial Sequence: Synthetic peptide
GGGEAAAKPAP

SEQ ID NO: 3396 - protein, 11 aa, synthetic construct
  source 1..11: note = Description of Artificial Sequence: Synthetic peptide
GGGPAPEAAAK

SEQ ID NO: 3397 - protein, 11 aa, synthetic construct
  source 1..11: note = Description of Artificial Sequence: Synthetic peptide
EAAAKGGGPAP

SEQ ID NO: 3398 - protein, 11 aa, synthetic construct
  source 1..11: note = Description of Artificial Sequence: Synthetic peptide
EAAAKPAPGGG

SEQ ID NO: 3399 - protein, 11 aa, synthetic construct
  source 1..11: note = Description of Artificial Sequence: Synthetic peptide
PAPGGGEAAAK

SEQ ID NO: 3400 - protein, 11 aa, synthetic construct
  source 1..11: note = Description of Artificial Sequence: Synthetic peptide
PAPEAAAKGGG

SEQ ID NO: 3401 - protein, 11 aa, synthetic construct
  source 1..11: note = Description of Artificial Sequence: Synthetic peptide
GSSEAAAKPAP

SEQ ID NO: 3402 - protein, 11 aa, synthetic construct
  source 1..11: note = Description of Artificial Sequence: Synthetic peptide
GSSPAPEAAAK

SEQ ID NO: 3403 - protein, 11 aa, synthetic construct
  source 1..11: note = Description of Artificial Sequence: Synthetic peptide
EAAAKGSSPAP

SEQ ID NO: 3404 - protein, 11 aa, synthetic construct
  source 1..11: note = Description of Artificial Sequence: Synthetic peptide
EAAAKPAPGSS

SEQ ID NO: 3405 - protein, 11 aa, synthetic construct
  source 1..11: note = Description of Artificial Sequence: Synthetic peptide
PAPGSSEAAAK

SEQ ID NO: 3406 - protein, 11 aa, synthetic construct
  source 1..11: note = Description of Artificial Sequence: Synthetic peptide
PAPEAAAKGSS

SEQ ID NO: 3407 - protein, 46 aa, synthetic construct
  source 1..46: note = Description of Artificial Sequence: Synthetic polypeptide
AEAAAKEAAAKEAAAKEAAAKALEAEAAAKEAAAKEAAAKEAAAKA

SEQ ID NO: 3408 - protein, 15 aa, synthetic construct
  source 1..15: note = Description of Artificial Sequence: Synthetic peptide
GGGGSEAAAKGGGGS

SEQ ID NO: 3409 - protein, 15 aa, synthetic construct
  source 1..15: note = Description of Artificial Sequence: Synthetic peptide
EAAAKGGGGSEAAAK

SEQ ID NO: 3410 - protein, 12 aa, synthetic construct
  source 1..12: note = Description of Artificial Sequence: Synthetic peptide
GSAGSAAGSGEF

SEQ ID NO: 3411 - protein, 30 aa, Rattus norvegicus
AHFKISGEKRPSTDPGKKAKNPKKKKKKDP

SEQ ID NO: 3412 - protein, 12 aa, Saccharomyces cerevisiae
AHRAKKMSKTHA

SEQ ID NO: 3413 - protein, 14 aa, unidentified
  source 1..14: note = Description of Unknown:NLS sequence
ASPEYVNLPINGNG

SEQ ID NO: 3414 - protein, 7 aa, unidentified
  source 1..7: note = Description of Unknown:NLS sequence
CTKRPRW

SEQ ID NO: 3415 - protein, 16 aa, unidentified
  source 1..16: note = Description of Unknown:NLS sequence
DKAKRVSRNKSEKKRR

SEQ ID NO: 3416 - protein, 15 aa, unidentified
  source 1..15: note = Description of Unknown:NLS sequence
EELRLKEELLKGIYA

SEQ ID NO: 3417 - protein, 16 aa, Caenorhabditis elegans
EEQLRRRKNSRLNNTG

SEQ ID NO: 3418 - protein, 24 aa, unidentified
  source 1..24: note = Description of Unknown:NLS sequence
EVLKVIRTGKRKKKAWKRMVTKVC

SEQ ID NO: 3419 - protein, 15 aa, unidentified
  source 1..15: note = Description of Unknown:NLS sequence
HHHHHHHHHHHHQPH

SEQ ID NO: 3420 - protein, 17 aa, unidentified
  source 1..17: note = Description of Unknown:NLS sequence
HKKKHPDASVNFSEFSK

SEQ ID NO: 3421 - protein, 6 aa, Oryza sativa
HKRTKK

SEQ ID NO: 3422 - protein, 29 aa, unidentified
  source 1..29: note = Description of Unknown:NLS sequence
IINGRKLKLKKSRRRSSQTSNNSFTSRRS

SEQ ID NO: 3423 - protein, 8 aa, Oryza sativa
KAEQERRK

SEQ ID NO: 3424 - protein, 18 aa, unidentified
  source 1..18: note = Description of Unknown:NLS sequence
KEKRKRREELFIEQKKRK

SEQ ID NO: 3425 - protein, 14 aa, Mus musculus
KKGKDEWFSRGKKP

SEQ ID NO: 3426 - protein, 12 aa, Homo sapiens
KKGPSVQKRKKT

SEQ ID NO: 3427 - protein, 16 aa, unidentified
  source 1..16: note = Description of Unknown:NLS sequence
KKKTVINDLLHYKKEK

SEQ ID NO: 3428 - protein, 17 aa, unidentified
  source 1..17: note = Description of Unknown:NLS sequence
KKNGGKGKNKPSAKIKK

SEQ ID NO: 3429 - protein, 13 aa, unidentified
  source 1..13: note = Description of Unknown:NLS sequence
KKPKWDDFKKKKK

SEQ ID NO: 3430 - protein, 6 aa, unidentified
  source 1..6: note = Description of Unknown:NLS sequence
KKRKKD

SEQ ID NO: 3431 - protein, 9 aa, unidentified
  source 1..9: note = Description of Unknown:NLS sequence
KKRRKRRRK

SEQ ID NO: 3432 - protein, 9 aa, unidentified
  source 1..9: note = Description of Unknown:NLS sequence
KKRRRRARK

SEQ ID NO: 3433 - protein, 7 aa, Homo sapiens
KKSKRGR

SEQ ID NO: 3434 - protein, 8 aa, Zea mays
KKSRKRGS

SEQ ID NO: 3435 - protein, 17 aa, unidentified
  source 1..17: note = Description of Unknown:NLS sequence
KKSTALSRELGKIMRRR

SEQ ID NO: 3436 - protein, 17 aa, Dictyostelium discoideum
KKSYQDPEIIAHSRPRK

SEQ ID NO: 3437 - protein, 17 aa, unidentified
  source 1..17: note = Description of Unknown:NLS sequence
KKTGKNRKLKSKRVKTR

SEQ ID NO: 3438 - protein, 17 aa, Oryza sativa
KKVSIAGQSGKLWRWKR

SEQ ID NO: 3439 - protein, 20 aa, unidentified
  source 1..20: note = Description of Unknown:NLS sequence
KKYENVVIKRSPRKRGRPRK

SEQ ID NO: 3440 - protein, 6 aa, unidentified
  source 1..6: note = Description of Unknown:NLS sequence
KNKKRK

SEQ ID NO: 3441 - protein, 6 aa, unidentified
  source 1..6: note = Description of Unknown:NLS sequence
KPKKKR

SEQ ID NO: 3442 - protein, 19 aa, Danio rerio
KRAMKDDSHGNSTSPKRRK

SEQ ID NO: 3443 - protein, 17 aa, Homo sapiens
KRANSNLVAAYEKAKKK

SEQ ID NO: 3444 - protein, 22 aa, unidentified
  source 1..22: note = Description of Unknown:NLS sequence
KRASEDTTSGSPPKKSSAGPKR

SEQ ID NO: 3445 - protein, 16 aa, unidentified
  source 1..16: note = Description of Unknown:NLS sequence
KRFKRRWMVRKMKTKK

SEQ ID NO: 3446 - protein, 16 aa, Homo sapiens
KRGLNSSFETSPKKVK

SEQ ID NO: 3447 - protein, 20 aa, unidentified
  source 1..20: note = Description of Unknown:NLS sequence
KRGNSSIGPNDLSKRKQRKK

SEQ ID NO: 3448 - protein, 23 aa, unidentified
  source 1..23: note = Description of Unknown:NLS sequence
KRIHSVSLSQSQIDPSKKVKRAK

SEQ ID NO: 3449 - protein, 15 aa, Homo sapiens
KRKGKLKNKGSKRKK

SEQ ID NO: 3450 - protein, 13 aa, Homo sapiens
KRRRRRRREKRKR

SEQ ID NO: 3451 - protein, 18 aa, Mus musculus
KRSNDRTYSPEEEKQRRA

SEQ ID NO: 3452 - protein, 21 aa, unidentified
  source 1..21: note = Description of Unknown:NLS sequence
KRTVATNGDASGAHRAKKMSK

SEQ ID NO: 3453 - protein, 20 aa, unidentified
  source 1..20: note = Description of Unknown:NLS sequence
KRVYNKGEDEQEHLPKGKKR

SEQ ID NO: 3454 - protein, 18 aa, unidentified
  source 1..18: note = Description of Unknown:NLS sequence
KSGKAPRRRAVSMDNSNK

SEQ ID NO: 3455 - protein, 19 aa, Homo sapiens
KVNFLDMSLDDIIIYKELE

SEQ ID NO: 3456 - protein, 15 aa, Tomato yellow leaf curl China virus
KVQHRIAKKTTRRRR

SEQ ID NO: 3457 - protein, 8 aa, unidentified
  source 1..8: note = Description of Unknown:NLS sequence
LSPSLSPL

SEQ ID NO: 3458 - protein, 52 aa, unidentified
  source 1..52: note = Description of Unknown:NLS sequence
MPQNEYIELHRKRYGYRLDYHEKKRKKESREAHERSKKAKKMIGLKAKLYHK

SEQ ID NO: 3459 - protein, 10 aa, unidentified
  source 1..10: note = Description of Unknown:NLS sequence
MVQLRPRASR

SEQ ID NO: 3460 - protein, 24 aa, Caenorhabditis elegans
NNKLLAKRRKGGASPKDDPMDDIK

SEQ ID NO: 3461 - protein, 20 aa, unidentified
  source 1..20: note = Description of Unknown:NLS sequence
NYKRPMDGTYGPPAKRHEGE

SEQ ID NO: 3462 - protein, 19 aa, unidentified
  source 1..19: note = Description of Unknown:NLS sequence
PDTKRAKLDSSETTMVKKK

SEQ ID NO: 3463 - protein, 7 aa, unidentified
  source 1..7: note = Description of Unknown:NLS sequence
PEKRTKI

SEQ ID NO: 3464 - protein, 8 aa, unidentified
  source 1..8: note = Description of Unknown:NLS sequence
PGGRGKKK

SEQ ID NO: 3465 - protein, 18 aa, unidentified
  source 1..18: note = Description of Unknown:NLS sequence
PGKMDKGEHRQERRDRPY

SEQ ID NO: 3466 - protein, 11 aa, Physarum polycephalum
PKKGDKYDKTD

SEQ ID NO: 3467 - protein, 7 aa, unidentified
  source 1..7: note = Description of Unknown:NLS sequence
PKKKSRK

SEQ ID NO: 3468 - protein, 7 aa, Caenorhabditis elegans
PKKNKPE

SEQ ID NO: 3469 - protein, 7 aa, unidentified
  source 1..7: note = Description of Unknown:NLS sequence
PKKRAKV

SEQ ID NO: 3470 - protein, 9 aa, unidentified
  source 1..9: note = Description of Unknown:NLS sequence
PKPKKLKVE

SEQ ID NO: 3471 - protein, 7 aa, unidentified
  source 1..7: note = Description of Unknown:NLS sequence
PKRGRGR

SEQ ID NO: 3472 - protein, 9 aa, Mammalian 1 orthobornavirus
PKRRLVDDA

SEQ ID NO: 3473 - protein, 7 aa, unidentified
  source 1..7: note = Description of Unknown:NLS sequence
PKRRRTY

SEQ ID NO: 3474 - protein, 6 aa, unidentified
  source 1..6: note = Description of Unknown:NLS sequence
PLFKRR

SEQ ID NO: 3475 - protein, 7 aa, unidentified
  source 1..7: note = Description of Unknown:NLS sequence
PLRKAKR

SEQ ID NO: 3476 - protein, 9 aa, unidentified
  source 1..9: note = Description of Unknown:NLS sequence
PPAKRKCIF

SEQ ID NO: 3477 - protein, 8 aa, Homo sapiens
PPARRRRL

SEQ ID NO: 3478 - protein, 8 aa, unidentified
  source 1..8: note = Description of Unknown:NLS sequence
PPKKKRKV

SEQ ID NO: 3479 - protein, 10 aa, Mus musculus
PPNKRMKVKH

SEQ ID NO: 3480 - protein, 13 aa, Mammalian 1 orthobornavirus
PPRIYPQLPSAPT

SEQ ID NO: 3481 - protein, 13 aa, unidentified
  source 1..13: note = Description of Unknown:NLS sequence
PQRSPFPKSSVKR

SEQ ID NO: 3482 - protein, 8 aa, Mammalian 1 orthobornavirus
PRPRKVPR

SEQ ID NO: 3483 - protein, 9 aa, unidentified
  source 1..9: note = Description of Unknown:NLS sequence
PRRRVQRKR

SEQ ID NO: 3484 - protein, 7 aa, unidentified
  source 1..7: note = Description of Unknown:NLS sequence
PRRVRLK

SEQ ID NO: 3485 - protein, 7 aa, unidentified
  source 1..7: note = Description of Unknown:NLS sequence
PSRKRPR

SEQ ID NO: 3486 - protein, 8 aa, unidentified
  source 1..8: note = Description of Unknown:NLS sequence
PSSKKRKV

SEQ ID NO: 3487 - protein, 7 aa, Drosophila melanogaster
PTKKRVK

SEQ ID NO: 3488 - protein, 9 aa, unidentified
  source 1..9: note = Description of Unknown:NLS sequence
QRPGPYDRP

SEQ ID NO: 3489 - protein, 18 aa, unidentified
  source 1..18: note = Description of Unknown:NLS sequence
RGKGGKGLGKGGAKRHRK

SEQ ID NO: 3490 - protein, 24 aa, Zea mays
RKAGKGGGGHKTTKKRSAKDEKVP

SEQ ID NO: 3491 - protein, 9 aa, Xenopus laevis
RKIKLKRAK

SEQ ID NO: 3492 - protein, 9 aa, Xenopus laevis
RKIKRKRAK

SEQ ID NO: 3493 - protein, 17 aa, unidentified
  source 1..17: note = Description of Unknown:NLS sequence
RKKEAPGPREELRSRGR

SEQ ID NO: 3494 - protein, 7 aa, unidentified
  source 1..7: note = Description of Unknown:NLS sequence
RKKRKGK

SEQ ID NO: 3495 - protein, 9 aa, unidentified
  source 1..9: note = Description of Unknown:NLS sequence
RKKRRQRRR

SEQ ID NO: 3496 - protein, 25 aa, Homo sapiens
RKKSIPLSIKNLKRKHKRKKNKITR

SEQ ID NO: 3497 - protein, 20 aa, Homo sapiens
RKLVKPKNTKMKTKLRTNPY

SEQ ID NO: 3498 - protein, 16 aa, unidentified
  source 1..16: note = Description of Unknown:NLS sequence
RKRLILSDKGQLDWKK

SEQ ID NO: 3499 - protein, 7 aa, Homo sapiens
RKRLKSK

SEQ ID NO: 3500 - protein, 9 aa, unidentified
  source 1..9: note = Description of Unknown:NLS sequence
RKRRVRDNM

SEQ ID NO: 3501 - protein, 22 aa, Homo sapiens
RKRSPKDKKEKDLDGAGKRRKT

SEQ ID NO: 3502 - protein, 22 aa, Homo sapiens
RKRTPRVDGQTGENDMNKRRRK

SEQ ID NO: 3503 - protein, 10 aa, unidentified
  source 1..10: note = Description of Unknown:NLS sequence
RLPVRRRRRR

SEQ ID NO: 3504 - protein, 10 aa, Feline immunodeficiency virus
RLRFRKPKSK

SEQ ID NO: 3505 - protein, 6 aa, Homo sapiens
RQQRKR

SEQ ID NO: 3506 - protein, 16 aa, Mus musculus
RRDLNSSFETSPKKVK

SEQ ID NO: 3507 - protein, 8 aa, Arabidopsis thaliana
RRDRAKLR

SEQ ID NO: 3508 - protein, 8 aa, unidentified
  source 1..8: note = Description of Unknown:NLS sequence
RRGDGRRR

SEQ ID NO: 3509 - protein, 11 aa, unidentified
  source 1..11: note = Description of Unknown:NLS sequence
RRGRKRKAEKQ

SEQ ID NO: 3510 - protein, 6 aa, unidentified
  source 1..6: note = Description of Unknown:NLS sequence
RRKKRR

SEQ ID NO: 3511 - protein, 19 aa, Mus musculus
RRKRSKSEDMDSVESKRRR

SEQ ID NO: 3512 - protein, 6 aa, unidentified
  source 1..6: note = Description of Unknown:NLS sequence
RRKRSR

SEQ ID NO: 3513 - protein, 14 aa, Homo sapiens
RRPKGKTLQKRKPK

SEQ ID NO: 3514 - protein, 18 aa, unidentified
  source 1..18: note = Description of Unknown:NLS sequence
RRRGFERFGPDNMGRKRK

SEQ ID NO: 3515 - protein, 15 aa, unidentified
  source 1..15: note = Description of Unknown:NLS sequence
RRRGKNKVAAQNCRK

SEQ ID NO: 3516 - protein, 6 aa, unidentified
  source 1..6: note = Description of Unknown:NLS sequence
RRRKRR

SEQ ID NO: 3517 - protein, 14 aa, unidentified
  source 1..14: note = Description of Unknown:NLS sequence
RRRQKQKGGASRRR

SEQ ID NO: 3518 - protein, 13 aa, unidentified
  source 1..13: note = Description of Unknown:NLS sequence
RRRREGPRARRRR

SEQ ID NO: 3519 - protein, 61 aa, unidentified
  source 1..61: note = Description of Unknown:NLS sequence
RRTIRLKLVYDKCDRSCKIQKKNRNKCQYCRFHKCLSVGMSHNAIRFGRMPRSEKAKLKAE

SEQ ID NO: 3520 - protein, 17 aa, unidentified
  source 1..17: note = Description of Unknown:NLS sequence
RRVPQRKEVSRCRKCRK

SEQ ID NO: 3521 - protein, 32 aa, Human mastadenovirus C
RVGGRRQAVECIEDLLNEPGQPLDLSCKRPRP

SEQ ID NO: 3522 - protein, 9 aa, unidentified
  source 1..9: note = Description of Unknown:NLS sequence
RVVKLRIAP

SEQ ID NO: 3523 - protein, 6 aa, Mus musculus
RVVRRR

SEQ ID NO: 3524 - protein, 12 aa, unidentified
  source 1..12: note = Description of Unknown:NLS sequence
SKRKTKISRKTR

SEQ ID NO: 3525 - protein, 16 aa, Squash leaf curl virus
SYVKTVPNRTRTYIKL

SEQ ID NO: 3526 - protein, 12 aa, unidentified
  source 1..12: note = Description of Unknown:NLS sequence
TGKNEAKKRKIA

SEQ ID NO: 3527 - protein, 30 aa, unidentified
  source 1..30: note = Description of Unknown:NLS sequence
TLSPASSPSSVSCPVIPASTDESPGSALNI

SEQ ID NO: 3528 - protein, 12 aa, unidentified
  source 1..12: note = Description of Unknown:NLS sequence
VSKKQRTGKKIH

SEQ ID NO: 3529 - protein, 9 aa, unidentified
  source 1..9: note = Description of Unknown:NLS sequence
SPKKKRKVE

SEQ ID NO: 3530 - protein, 19 aa, unidentified
  source 1..19: note = Description of Unknown:NLS sequence
KRTADGSEFESPKKKRKVE

SEQ ID NO: 3531 - protein, 9 aa, unidentified
  source 1..9: note = Description of Unknown:NLS sequence
PAAKRVKLD

SEQ ID NO: 3532 - protein, 7 aa, unidentified
  source 1..7: note = Description of Unknown:NLS sequence
PKKKRKV

SEQ ID NO: 3533 - protein, 11 aa, unidentified
  source 1..11: note = Description of Unknown:NLS sequence
SPKKKRKVEAS

SEQ ID NO: 3534 - protein, 16 aa, unidentified
  source 1..16: note = Description of Unknown:NLS sequence
MAPKKKRKVGIHRGVP

SEQ ID NO: 3535 - DNA, 24 bp, synthetic construct
  source 1..24: mol_type = other DNA; note = Description of Artificial Sequence: Synthetic oligonucleotide
gttgtagctccctttctcatttcg

SEQ ID NO: 3536 - DNA, 93 bp, synthetic construct
  source 1..93: mol_type = other DNA; note = Description of Artificial Sequence: Synthetic oligonucleotide
cgaaatgagaaccgttgctacaataaggccgtctgaaaagatgtgccgcaacgctctgccccttaaagcttctgctttaaggggcatcgttta

SEQ ID NO: 3537 - DNA, 25 bp, synthetic construct
  source 1..25: mol_type = other DNA; note = Description of Artificial Sequence: Synthetic oligonucleotide
gttgtagctccctttttcatttcgc

SEQ ID NO: 3538 - DNA, 87 bp, synthetic construct
  source 1..87: mol_type = other DNA; note = Description of Artificial Sequence: Synthetic oligonucleotide
gcgaaatgaaaaacgttgttacaataagagatgaatttctcgcaaagctctgcctcttgaaatttcggtttcaagaggcatcttttt

SEQ ID NO: 3539 - DNA, 14 bp, synthetic construct
  source 1..14: mol_type = other DNA; note = Description of Artificial Sequence: Synthetic oligonucleotide
gttttagtactctg

SEQ ID NO: 3540 - DNA, 58 bp, synthetic construct
  source 1..58: mol_type = other DNA; note = Description of Artificial Sequence: Synthetic oligonucleotide
cagaatctactaaaacaaggcaaaatgccgtgtttatctcgtcaacttgttggcgaga

SEQ ID NO: 3541 - DNA, 18 bp, synthetic construct
  source 1..18: mol_type = other DNA; note = Description of Artificial Sequence: Synthetic oligonucleotide
gttttagtactctgtaat

SEQ ID NO: 3542 - DNA, 62 bp, synthetic construct
  source 1..62: mol_type = other DNA; note = Description of Artificial Sequence: Synthetic oligonucleotide
attacagaatctactaaaacaaggcaaaatgccgtgtttatctcgtcaacttgttggcgaga

SEQ ID NO: 3543 - DNA, 63 bp, synthetic construct
  source 1..63: mol_type = other DNA; note = Description of Artificial Sequence: Synthetic oligonucleotide
cagaatctactaaaacaaggcaaaatgccgtgtttatctcgtcaacttgttggcgagattttt

SEQ ID NO: 3544 - DNA, 12 bp, synthetic construct
  source 1..12: mol_type = other DNA; note = Description of Artificial Sequence: Synthetic oligonucleotide
gttttagagcta

SEQ ID NO: 3545 - DNA, 60 bp, synthetic construct
  source 1..60: mol_type = other DNA; note = Description of Artificial Sequence: Synthetic oligonucleotide
tagcaagttaaaataaggctagtccgttatcaacttgaaaaagtggcaccgagtcggtgc

SEQ ID NO: 3546 - DNA, 17 bp, synthetic construct
  source 1..17: mol_type = other DNA; note = Description of Artificial Sequence: Synthetic oligonucleotide
gtttaagagctatgctg

SEQ ID NO: 3547 - DNA, 65 bp, synthetic construct
  source 1..65: mol_type = other DNA; note = Description of Artificial Sequence: Synthetic oligonucleotide
cagcatagcaagtttaaataaggctagtccgttatcaacttgaaaaagtggcaccgagtcggtgc

SEQ ID NO: 3548 - DNA, 14 bp, synthetic construct
  source 1..14: mol_type = other DNA; note = Description of Artificial Sequence: Synthetic oligonucleotide
gtctttgtactctg

SEQ ID NO: 3549 - DNA, 66 bp, synthetic construct
  source 1..66: mol_type = other DNA; note = Description of Artificial Sequence: Synthetic oligonucleotide
cagaagctacaaagataaggcttcatgccgaaatcaacaccctgtcattttatggcagggtgtttt

SEQ ID NO: 3550 - DNA, 16 bp, synthetic construct
  source 1..16: mol_type = other DNA; note = Description of Artificial Sequence: Synthetic oligonucleotide
gctatagttccttact

SEQ ID NO: 3551 - DNA, 127 bp, synthetic construct
  source 1..127: mol_type = other DNA; note = Description of Artificial Sequence: Synthetic polynucleotide
ggtaagttgctatagtaagggcaacagacccgaggcgttggggatcgcctagcccgtgtttacgggctctccccatattcaaaataatgacagacgagcaccttggagcatttatctccgaggtgct

SEQ ID NO: 3552 - RNA, 14 nt, synthetic construct
  source 1..14: mol_type = other RNA; note = Description of Artificial Sequence: Synthetic oligonucleotide
gtcttagtactctg

SEQ ID NO: 3553 - RNA, 65 nt, synthetic construct
  source 1..65: mol_type = other RNA; note = Description of Artificial Sequence: Synthetic oligonucleotide
cagaatctactaagacaaggcaaaatgccgtgtttatctcgtcaacttgttggcgagattttttt

SEQ ID NO: 3554 - RNA, 12 nt, synthetic construct
  source 1..12: mol_type = other RNA; note = Description of Artificial Sequence: Synthetic oligonucleotide
actggggttcag

SEQ ID NO: 3555 - RNA, 76 nt, synthetic construct
  source 1..76: mol_type = other RNA; note = Description of Artificial Sequence: Synthetic oligonucleotide
ctgaacctcagtaagcattggctcgtttccaatgttgattgctccgccggtgctccttatttttaagggcgccggc

SEQ ID NO: 3556 - DNA, 12 bp, synthetic construct
  source 1..12: mol_type = other DNA; note = Description of Artificial Sequence: Synthetic oligonucleotide
gttttagtccct

SEQ ID NO: 3557 - DNA, 63 bp, synthetic construct
  source 1..63: mol_type = other DNA; note = Description of Artificial Sequence: Synthetic oligonucleotide
agggactaaaataaagagtttgcgggactctgcggggttacaatcccctaaaaccgctttttt

SEQ ID NO: 3558 - RNA, 16 nt, synthetic construct
  source 1..16: mol_type = other RNA; note = Description of Artificial Sequence: Synthetic oligonucleotide
gtcatagttcccctga

SEQ ID NO: 3559 - RNA, 98 nt, synthetic construct
  source 1..98: mol_type = other RNA; note = Description of Artificial Sequence: Synthetic oligonucleotide
tcagggttactatgataagggctttctgcctaaggcagactgacccgcggcgttggggatcgcctgtcgcccgcttttggcgggcattccccatcctt

SEQ ID NO: 3560 - protein, 2117 aa, synthetic construct
  source 1..2117: note = Description of Artificial Sequence: Synthetic polypeptide
MKRTADGSEFESPKKKRKVDKKYSIGLDIGTNSVGWAVITDEYKVPSKKFKVLGNTDRHSIKKNLIGALLFDSGETAEATRLKRTARRRYTRRKNRICYLQEIFSNEMAKVDDSFFHRLEESFLVEEDKKHERHPIFGNIVDEVAYHEKYPTIYHLRKKLVDSTDKADLRLIYLALAHMIKFRGHFLIEGDLNPDNSDVDKLFIQLVQTYNQLFEENPINASGVDAKAILSARLSKSRRLENLIAQLPGEKKNGLFGNLIALSLGLTPNFKSNFDLAEDAKLQLSKDTYDDDLDNLLAQIGDQYADLFLAAKNLSDAILLSDILRVNTEITKAPLSASMIKRYDEHHQDLTLLKALVRQQLPEKYKEIFFDQSKNGYAGYIDGGASQEEFYKFIKPILEKMDGTEELLVKLNREDLLRKQRTFDNGSIPHQIHLGELHAILRRQEDFYPFLKDNREKIEKILTFRIPYYVGPLARGNSRFAWMTRKSEETITPWNFEEVVDKGASAQSFIERMTNFDKNLPNEKVLPKHSLLYEYFTVYNELTKVKYVTEGMRKPAFLSGEQKKAIVDLLFKTNRKVTVKQLKEDYFKKIECFDSVEISGVEDRFNASLGTYHDLLKIIKDKDFLDNEENEDILEDIVLTLTLFEDREMIEERLKTYAHLFDDKVMKQLKRRRYTGWGRLSRKLINGIRDKQSGKTILDFLKSDGFANRNFMQLIHDDSLTFKEDIQKAQVSGQGDSLHEHIANLAGSPAIKKGILQTVKVVDELVKVMGRHKPENIVIEMARENQTTQKGQKNSRERMKRIEEGIKELGSQILKEHPVENTQLQNEKLYLYYLQNGRDMYVDQELDINRLSDYDVDHIVPQSFLKDDSIDNKVLTRSDKARGKSDNVPSEEVVKKMKNYWRQLLNAKLITQRKFDNLTKAERGGLSELDKAGFIKRQLVETRQITKHVAQILDSRMNTKYDENDKLIREVKVITLKSKLVSDFRKDFQFYKVREINNYHHAHDAYLNAVVGTALIKKYPKLESEFVYGDYKVYDVRKMIAKSEQEIGKATAKYFFYSNIMNFFKTEITLANGEIRKRPLIETNGETGEIVWDKGRDFATVRKVLSMPQVNIVKKTEVQTGGFSKESILPKRNSDKLIARKKDWDPKKYGGFDSPTVAYSVLVVAKVEKGKSKKLKSVKELLGITIMERSSFEKNPIDFLEAKGYKEVKKDLIIKLPKYSLFELENGRKRMLASAGELQKGNELALPSKYVNFLYLASHYEKLKGSPEDNEQKQLFVEQHKHYLDEIIEQISEFSKRVILADANLDKVLSAYNKHRDKPIREQAENIIHLFTLTNLGAPAAFKYFDTTIDRKRYTSTKEVLDATLIHQSITGLYETRIDLSQLGGDSGGSSGGSSGSETPGTSESATPESSGGSSGGSSTLNIEDEYRLHETSKEPDVSLGSTWLSDFPQAWAETGGMGLAVRQAPLIIPLKATSTPVSIKQYPMSQEARLGIKPHIQRLLDQGILVPCQSPWNTPLLPVKKPGTNDYRPVQDLREVNKRVEDIHPTVPNPYNLLSGLPPSHQWYTVLDLKDAFFCLRLHPTSQPLFAFEWRDPEMGISGQLTWTRLPQGFKNSPTLFNEALHRDLADFRIQHPDLILLQYVDDLLLAATSELDCQQGTRALLQTLGNLGYRASAKKAQICQKQVKYLGYLLKEGQRWLTEARKETVMGQPTPKTPRQLREFLGKAGFCRLFIPGFAEMAAPLYPLTKPGTLFNWGPDQQKAYQEIKQALLTAPALGLPDLTKPFELFVDEKQGYAKGVLTQKLGPWRRPVAYLSKKLDPVAAGWPPCLRMVAAIAVLTKDAGKLTMGQPLVILAPHAVEALVKQPPDRWLSNARMTHYQALLLDTDRVQFGPVVALNPATLLPLPEEGLQHNCLDILAEAHGTRPDLTDQPLPDADHTWYTDGSSLLQEGQRKAGAAVTTETEVIWAKALPAGTSAQRAELIALTQALKMAEGKKLNVYTDSRYAFATAHIHGEIYRRRGWLTSEGKEIKNKDEILALLKALFLPKRLSIIHCPGHQKGHSAEARGNRMADQAARKAAITETPDTSTLLIENSSPSGGSKRTADGSEFEPKKKRKV

SEQ ID NO: 3561 - protein, 2080 aa, synthetic construct
  source 1..2080: note = Description of Artificial Sequence: Synthetic polypeptide
MAPKKKRKVGIHGVPAADKKYSIGLDIGTNSVGWAVITDEYKVPSKKFKVLGNTDRHSIKKNLIGALLFDSGETAEATRLKRTARRRYTRRKNRICYLQEIFSNEMAKVDDSFFHRLEESFLVEEDKKHERHPIFGNIVDEVAYHEKYPTIYHLRKKLVDSTDKADLRLIYLALAHMIKFRGHFLIEGDLNPDNSDVDKLFIQLVQTYNQLFEENPINASGVDAKAILSARLSKSRRLENLIAQLPGEKKNGLFGNLIALSLGLTPNFKSNFDLAEDAKLQLSKDTYDDDLDNLLAQIGDQYADLFLAAKNLSDAILLSDILRVNTEITKAPLSASMIKRYDEHHQDLTLLKALVRQQLPEKYKEIFFDQSKNGYAGYIDGGASQEEFYKFIKPILEKMDGTEELLVKLNREDLLRKQRTFDNGSIPHQIHLGELHAILRRQEDFYPFLKDNREKIEKILTFRIPYYVGPLARGNSRFAWMTRKSEETITPWNFEEVVDKGASAQSFIERMTNFDKNLPNEKVLPKHSLLYEYFTVYNELTKVKYVTEGMRKPAFLSGEQKKAIVDLLFKTNRKVTVKQLKEDYFKKIECFDSVEISGVEDRFNASLGTYHDLLKIIKDKDFLDNEENEDILEDIVLTLTLFEDREMIEERLKTYAHLFDDKVMKQLKRRRYTGWGRLSRKLINGIRDKQSGKTILDFLKSDGFANRNFMQLIHDDSLTFKEDIQKAQVSGQGDSLHEHIANLAGSPAIKKGILQTVKVVDELVKVMGRHKPENIVIEMARENQTTQKGQKNSRERMKRIEEGIKELGSQILKEHPVENTQLQNEKLYLYYLQNGRDMYVDQELDINRLSDYDVDHIVPQSFLKDDSIDNKVLTRSDKARGKSDNVPSEEVVKKMKNYWRQLLNAKLITQRKFDNLTKAERGGLSELDKAGFIKRQLVETRQITKHVAQILDSRMNTKYDENDKLIREVKVITLKSKLVSDFRKDFQFYKVREINNYHHAHDAYLNAVVGTALIKKYPKLESEFVYGDYKVYDVRKMIAKSEQEIGKATAKYFFYSNIMNFFKTEITLANGEIRKRPLIETNGETGEIVWDKGRDFATVRKVLSMPQVNIVKKTEVQTGGFSKESILPKRNSDKLIARKKDWDPKKYGGFDSPTVAYSVLVVAKVEKGKSKKLKSVKELLGITIMERSSFEKNPIDFLEAKGYKEVKKDLIIKLPKYSLFELENGRKRMLASAGELQKGNELALPSKYVNFLYLASHYEKLKGSPEDNEQKQLFVEQHKHYLDEIIEQISEFSKRVILADANLDKVLSAYNKHRDKPIREQAENIIHLFTLTNLGAPAAFKYFDTTIDRKRYTSTKEVLDATLIHQSITGLYETRIDLSQLGGDSGGSSGGSSGSETPGTSESATPESSGGSSGGSSLDDEYRLYSPLVKPDQNIQFWLEQFPQAWAETAGMGLAKQVPPQVIQLKASATPVSVRQYPLSKEAQEGIRPHVQRLIQQGILVPVQSPWNTPLLPVRKPGTNDYRPVQDLREVNKRVQDIHPTVPNPYNLLCALPPQRSWYTVLDLKDAFFCLRLHPTSQPLFAFEWRDPGTGRTGQLTWTRLPQGFKNSPTIFNEALHRDLANFRIQHPQVTLLQYVDDLLLAGATKQDCLEGTKALLLELSDLGYRASAKKAQICRREVTYLGYSLRDGQRWLTEARKKTVVQIPAPTTAKQVREFLGKAGFCRLFIPGFATLAAPLYPLTKPKGEFSWAPEHQKAFDAIKKALLSAPALALPDVTKPFTLYVDERKGVARGVLTQTLGPWRRPVAYLSKKLDPVASGWPVCLKAIAAVAILVKDADKLTLGQNITVIAPHALENIVRQPPDRWMTNARMTHYQSLLLTERVTFAPPAALNPATLLPEETDEPVTHDCHQLLIEETGVRKDLTDIPLTGEVLTWFTDGSSYVVEGKRMAGAAVVDGTRTIWASSLPEGTSAQKAELMALTQALRLAEGKSINIYTDSRYAFATAHVHGAIYKQRGWLTSAGREIKNKEEILSLLEALHLPKRLAIIHCPGHQKAKDPISRGNQMADRVAKQAAQGVNLLP

SEQ ID NO: 3562 - protein, 2088 aa, synthetic construct
  source 1..2088: note = Description of Artificial Sequence: Synthetic polypeptide
MAPKKKRKVGIHGVPAADKKYSIGLDIGTNSVGWAVITDEYKVPSKKFKVLGNTDRHSIKKNLIGALLFDSGETAEATRLKRTARRRYTRRKNRICYLQEIFSNEMAKVDDSFFHRLEESFLVEEDKKHERHPIFGNIVDEVAYHEKYPTIYHLRKKLVDSTDKADLRLIYLALAHMIKFRGHFLIEGDLNPDNSDVDKLFIQLVQTYNQLFEENPINASGVDAKAILSARLSKSRRLENLIAQLPGEKKNGLFGNLIALSLGLTPNFKSNFDLAEDAKLQLSKDTYDDDLDNLLAQIGDQYADLFLAAKNLSDAILLSDILRVNTEITKAPLSASMIKRYDEHHQDLTLLKALVRQQLPEKYKEIFFDQSKNGYAGYIDGGASQEEFYKFIKPILEKMDGTEELLVKLNREDLLRKQRTFDNGSIPHQIHLGELHAILRRQEDFYPFLKDNREKIEKILTFRIPYYVGPLARGNSRFAWMTRKSEETITPWNFEEVVDKGASAQSFIERMTNFDKNLPNEKVLPKHSLLYEYFTVYNELTKVKYVTEGMRKPAFLSGEQKKAIVDLLFKTNRKVTVKQLKEDYFKKIECFDSVEISGVEDRFNASLGTYHDLLKIIKDKDFLDNEENEDILEDIVLTLTLFEDREMIEERLKTYAHLFDDKVMKQLKRRRYTGWGRLSRKLINGIRDKQSGKTILDFLKSDGFANRNFMQLIHDDSLTFKEDIQKAQVSGQGDSLHEHIANLAGSPAIKKGILQTVKVVDELVKVMGRHKPENIVIEMARENQTTQKGQKNSRERMKRIEEGIKELGSQILKEHPVENTQLQNEKLYLYYLQNGRDMYVDQELDINRLSDYDVDHIVPQSFLKDDSIDNKVLTRSDKARGKSDNVPSEEVVKKMKNYWRQLLNAKLITQRKFDNLTKAERGGLSELDKAGFIKRQLVETRQITKHVAQILDSRMNTKYDENDKLIREVKVITLKSKLVSDFRKDFQFYKVREINNYHHAHDAYLNAVVGTALIKKYPKLESEFVYGDYKVYDVRKMIAKSEQEIGKATAKYFFYSNIMNFFKTEITLANGEIRKRPLIETNGETGEIVWDKGRDFATVRKVLSMPQVNIVKKTEVQTGGFSKESILPKRNSDKLIARKKDWDPKKYGGFDSPTVAYSVLVVAKVEKGKSKKLKSVKELLGITIMERSSFEKNPIDFLEAKGYKEVKKDLIIKLPKYSLFELENGRKRMLASAGELQKGNELALPSKYVNFLYLASHYEKLKGSPEDNEQKQLFVEQHKHYLDEIIEQISEFSKRVILADANLDKVLSAYNKHRDKPIREQAENIIHLFTLTNLGAPAAFKYFDTTIDRKRYTSTKEVLDATLIHQSITGLYETRIDLSQLGGDSGGSSGGSSGSETPGTSESATPESSGGSSGGSSLGIEDEYRLHETSTEPDVSLGSTWLSDFPQAWAETGGMGLAVRQAPLIIPLKATSTPVSIQQYPMSHEARLGIKPHIQRLLDQGILVPCQSPWNTPLLPVKKPGTNDYRPVQDLREVNKRVEDIHPTVPNPYNLLSGLPPSHQWYTVLDLKDAFFCLRLHPTSQPLFAFEWRDPGMGISGQLTWTRLPQGFKNSPTLFNEALHRDLADFRIQHPDLILLQYVDDILLAATSELDCQQGTRALLQTLGDLGYRASAKKAQICQKQVKYLGYLLREGQRWLTEARKETVMGQPVPKTPRQLREFLGKAGFCRLFIPGFAEMAAPLYPLTKPGTLFSWGPDQQKAYQEIKQALLTAPALGLPDLTKPFELFVDEKQGYAKGVLTQKLGPWRRPVAYLSKKLDPVAAGWPPCLRMVAAIAVLTKDAGKLTMGQPLVILAPHAVEALVKQPPDRWLSNARMTHYQAMLLDTDRVQFGPVVALNPATLLPLPEEGAPHDCLEILAETHGTRPDLTDQPIPDADHTWYTDGSSFLQEGQRKAGAAVTTETEVIWAGALPAGTSAQRAELIALTQALKMAEGKRLNVYTDSRYAFATAHIHGEIYRRRGWLTSEGREIKNKSEILALLKALFLPKRLSIIHCLGHQKGDSAEARGNRLADQAAREAAIKTPPDTSTLLI

SEQ ID NO: 3563 - protein, 2108 aa, synthetic construct
  source 1..2108: note = Description of Artificial Sequence: Synthetic polypeptide
MAPKKKRKVGIHGVPAADKKYSIGLDIGTNSVGWAVITDEYKVPSKKFKVLGNTDRHSIKKNLIGALLFDSGETAEATRLKRTARRRYTRRKNRICYLQEIFSNEMAKVDDSFFHRLEESFLVEEDKKHERHPIFGNIVDEVAYHEKYPTIYHLRKKLVDSTDKADLRLIYLALAHMIKFRGHFLIEGDLNPDNSDVDKLFIQLVQTYNQLFEENPINASGVDAKAILSARLSKSRRLENLIAQLPGEKKNGLFGNLIALSLGLTPNFKSNFDLAEDAKLQLSKDTYDDDLDNLLAQIGDQYADLFLAAKNLSDAILLSDILRVNTEITKAPLSASMIKRYDEHHQDLTLLKALVRQQLPEKYKEIFFDQSKNGYAGYIDGGASQEEFYKFIKPILEKMDGTEELLVKLNREDLLRKQRTFDNGSIPHQIHLGELHAILRRQEDFYPFLKDNREKIEKILTFRIPYYVGPLARGNSRFAWMTRKSEETITPWNFEEVVDKGASAQSFIERMTNFDKNLPNEKVLPKHSLLYEYFTVYNELTKVKYVTEGMRKPAFLSGEQKKAIVDLLFKTNRKVTVKQLKEDYFKKIECFDSVEISGVEDRFNASLGTYHDLLKIIKDKDFLDNEENEDILEDIVLTLTLFEDREMIEERLKTYAHLFDDKVMKQLKRRRYTGWGRLSRKLINGIRDKQSGKTILDFLKSDGFANRNFMQLIHDDSLTFKEDIQKAQVSGQGDSLHEHIANLAGSPAIKKGILQTVKVVDELVKVMGRHKPENIVIEMARENQTTQKGQKNSRERMKRIEEGIKELGSQILKEHPVENTQLQNEKLYLYYLQNGRDMYVDQELDINRLSDYDVDHIVPQSFLKDDSIDNKVLTRSDKARGKSDNVPSEEVVKKMKNYWRQLLNAKLITQRKFDNLTKAERGGLSELDKAGFIKRQLVETRQITKHVAQILDSRMNTKYDENDKLIREVKVITLKSKLVSDFRKDFQFYKVREINNYHHAHDAYLNAVVGTALIKKYPKLESEFVYGDYKVYDVRKMIAKSEQEIGKATAKYFFYSNIMNFFKTEITLANGEIRKRPLIETNGETGEIVWDKGRDFATVRKVLSMPQVNIVKKTEVQTGGFSKESILPKRNSDKLIARKKDWDPKKYGGFDSPTVAYSVLVVAKVEKGKSKKLKSVKELLGITIMERSSFEKNPIDFLEAKGYKEVKKDLIIKLPKYSLFELENGRKRMLASAGELQKGNELALPSKYVNFLYLASHYEKLKGSPEDNEQKQLFVEQHKHYLDEIIEQISEFSKRVILADANLDKVLSAYNKHRDKPIREQAENIIHLFTLTNLGAPAAFKYFDTTIDRKRYTSTKEVLDATLIHQSITGLYETRIDLSQLGGDSGGSSGGSSGSETPGTSESATPESSGGSSGGSSVQEISDSRPMLHIYLNGRRFLGLLDTGADKTCIAGRDWPANWPIHQTESSLQGLGMACGVARSSQPLRWQHEDKSGIIHPFVIPTLPFTLWGRDIMKDIKVRLMTDSPDDSQDLMIGAIESNLFADQISWKSDQPVWLNQWPLKQEKLQALQQLVTEQLQLGHLEESNSPWNTPVFVIKKKSGKWRLLQDLRAVNATMHDMGALQPGLPSPVAVPKGWEIIIIDLQDCFFNIKLHPEDCKRFAFSVPSPNFKRPYQRFQWKVLPQGMKNSPTLCQKFVDKAILTVRDKYQDSYIVHYMDDILLAHPSRSIVDEILTSMIQALNKHGLVVSTEKIQKYDNLKYLGTHIQGDSVSYQKLQIRTDKLRTLNDFQKLLGNINWIRPFLKLTTGELKPLFEILNGDSNPISTRKLTPEACKALQLMNERLSTARVKRLDLSQPWSLCILKTEYTPTACLWQDGVVEWIHLPHISPKVITPYDIFCTQLIIKGRHRSKELFSKDPDYIVVPYTKVQFDLLLQEKEDWPISLLGFLGEVHFHLPKDPLLTFTLQTAIIFPHMTSTTPLEKGIVIFTDGSANGRSVTYIQGREPIIKENTQNTAQQAEIVAVITAFEEVSQPFNLYTDSKYVTGLFPEIETATLSPRTKIYTELKHLQRLIHKRQEKFYIGHIRGHTGLPGPLAQGNAYADSLTRILTA

SEQ ID NO: 3564 - protein, 2002 aa, synthetic construct
  source 1..2002: note = Description of Artificial Sequence: Synthetic polypeptide
MAPKKKRKVGIHGVPAADKKYSIGLDIGTNSVGWAVITDEYKVPSKKFKVLGNTDRHSIKKNLIGALLFDSGETAEATRLKRTARRRYTRRKNRICYLQEIFSNEMAKVDDSFFHRLEESFLVEEDKKHERHPIFGNIVDEVAYHEKYPTIYHLRKKLVDSTDKADLRLIYLALAHMIKFRGHFLIEGDLNPDNSDVDKLFIQLVQTYNQLFEENPINASGVDAKAILSARLSKSRRLENLIAQLPGEKKNGLFGNLIALSLGLTPNFKSNFDLAEDAKLQLSKDTYDDDLDNLLAQIGDQYADLFLAAKNLSDAILLSDILRVNTEITKAPLSASMIKRYDEHHQDLTLLKALVRQQLPEKYKEIFFDQSKNGYAGYIDGGASQEEFYKFIKPILEKMDGTEELLVKLNREDLLRKQRTFDNGSIPHQIHLGELHAILRRQEDFYPFLKDNREKIEKILTFRIPYYVGPLARGNSRFAWMTRKSEETITPWNFEEVVDKGASAQSFIERMTNFDKNLPNEKVLPKHSLLYEYFTVYNELTKVKYVTEGMRKPAFLSGEQKKAIVDLLFKTNRKVTVKQLKEDYFKKIECFDSVEISGVEDRFNASLGTYHDLLKIIKDKDFLDNEENEDILEDIVLTLTLFEDREMIEERLKTYAHLFDDKVMKQLKRRRYTGWGRLSRKLINGIRDKQSGKTILDFLKSDGFANRNFMQLIHDDSLTFKEDIQKAQVSGQGDSLHEHIANLAGSPAIKKGILQTVKVVDELVKVMGRHKPENIVIEMARENQTTQKGQKNSRERMKRIEEGIKELGSQILKEHPVENTQLQNEKLYLYYLQNGRDMYVDQELDINRLSDYDVDHIVPQSFLKDDSIDNKVLTRSDKARGKSDNVPSEEVVKKMKNYWRQLLNAKLITQRKFDNLTKAERGGLSELDKAGFIKRQLVETRQITKHVAQILDSRMNTKYDENDKLIREVKVITLKSKLVSDFRKDFQFYKVREINNYHHAHDAYLNAVVGTALIKKYPKLESEFVYGDYKVYDVRKMIAKSEQEIGKATAKYFFYSNIMNFFKTEITLANGEIRKRPLIETNGETGEIVWDKGRDFATVRKVLSMPQVNIVKKTEVQTGGFSKESILPKRNSDKLIARKKDWDPKKYGGFDSPTVAYSVLVVAKVEKGKSKKLKSVKELLGITIMERSSFEKNPIDFLEAKGYKEVKKDLIIKLPKYSLFELENGRKRMLASAGELQKGNELALPSKYVNFLYLASHYEKLKGSPEDNEQKQLFVEQHKHYLDEIIEQISEFSKRVILADANLDKVLSAYNKHRDKPIREQAENIIHLFTLTNLGAPAAFKYFDTTIDRKRYTSTKEVLDATLIHQSITGLYETRIDLSQLGGDSGGSSGGSSGSETPGTSESATPESSGGSSGGSSTAAIDILAPQQCAEPITWKSDEPVWVDQWPLTNDKLAAAQQLVQEQLEAGHITESSSPWNTPIFVIKKKSGKWRLLQDLRAVNATMVLMGALQPGLPSPVAIPQGYLKIIIDLKDCFFSIPLHPSDQKRFAFSLPSTNFKEPMQRFQWKVLPQGMANSPTLCQKYVATAIHKVRHAWKQMYIIHYMDDILIAGKDGQQVLQCFDQLKQELTAAGLHIAPEKVQLQDPYTYLGFELNGPKITNQKAVIRKDKLQTLNDFQKLLGDINWLRPYLKLTTGDLKPLFDTLKGDSDPNSHRSLSKEALASLEKVETAIAEQFVTHINYSLPLIFLIFNTALTPTGLFWQDNPIMWIHLPASPKKVLLPYYDAIADLIILGRDHSKKYFGIEPSTIIQPYSKSQIDWLMQNTEMWPIACASFVGILDNHYPPNKLIQFCKLHTFVFPQIISKTPLNNALLVFTDGSSTGMAAYTLTDTTIKFQTNLNSAQLVELQALIAVLSAFPNQPLNIYTDSAYLAHSIPLLETVAQIKHISETAKLFLQCQQLIYNRSIPFYIGHVRAHSGLPGPIAQGNQRADLATKIVASNINTN

SEQ ID NO: 3565 - RNA, 6507 nt, synthetic construct
  source 1..6507: mol_type = other RNA; note = Description of Artificial Sequence: Synthetic polynucleotide
aggaaataagagagaaaagaagagtaagaagaaatataagagccaccatgaaacggacagccgacggaagcgagttcgagtcaccaaagaagaagcggaaagtcgacaagaagtacagcatcggcctggacatcggcaccaactctgtgggctgggccgtgatcaccgacgagtacaaggtgcccagcaagaaattcaaggtgctgggcaacaccgaccggcacagcatcaagaagaacctgatcggagccctgctgttcgacagcggcgaaacagccgaggccacccggctgaagagaaccgccagaagaagatacaccagacggaagaaccggatctgctatctgcaagagatcttcagcaacgagatggccaaggtggacgacagcttcttccacagactggaagagtccttcctggtggaagaggataagaagcacgagcggcaccccatcttcggcaacatcgtggacgaggtggcctaccacgagaagtaccccaccatctaccacctgagaaagaaactggtggacagcaccgacaaggccgacctgcggctgatctatctggccctggcccacatgatcaagttccggggccacttcctgatcgagggcgacctgaaccccgacaacagcgacgtggacaagctgttcatccagctggtgcagacctacaaccagctgttcgaggaaaaccccatcaacgccagcggcgtggacgccaaggccatcctgtctgccagactgagcaagagcagacggctggaaaatctgatcgcccagctgcccggcgagaagaagaatggcctgttcggaaacctgattgccctgagcctgggcctgacccccaacttcaagagcaacttcgacctggccgaggatgccaaactgcagctgagcaaggacacctacgacgacgacctggacaacctgctggcccagatcggcgaccagtacgccgacctgtttctggccgccaagaacctgtccgacgccatcctgctgagcgacatcctgagagtgaacaccgagatcaccaaggcccccctgagcgcctctatgatcaagagatacgacgagcaccaccaggacctgaccctgctgaaagctctcgtgcggcagcagctgcctgagaagtacaaagagattttcttcgaccagagcaagaacggctacgccggctacattgacggcggagccagccaggaagagttctacaagttcatcaagcccatcctggaaaagatggacggcaccgaggaactgctcgtgaagctgaacagagaggacctgctgcggaagcagcggaccttcgacaacggcagcatcccccaccagatccacctgggagagctgcacgccattctgcggcggcaggaagatttttacccattcctgaaggacaaccgggaaaagatcgagaagatcctgaccttccgcatcccctactacgtgggccctctggccaggggaaacagcagattcgcctggatgaccagaaagagcgaggaaaccatcaccccctggaacttcgaggaagtggtggacaagggcgcttccgcccagagcttcatcgagcggatgaccaacttcgataagaacctgcccaacgagaaggtgctgcccaagcacagcctgctgtacgagtacttcaccgtgtataacgagctgaccaaagtgaaatacgtgaccgagggaatgagaaagcccgccttcctgagcggcgagcagaaaaaggccatcgtggacctgctgttcaagaccaaccggaaagtgaccgtgaagcagctgaaagaggactacttcaagaaaatcgagtgcttcgactccgtggaaatctccggcgtggaagatcggttcaacgcctccctgggcacataccacgatctgctgaaaattatcaaggacaaggacttcctggacaatgaggaaaacgaggacattctggaagatatcgtgctgaccctgacactgtttgaggacagagagatgatcgaggaacggctgaaaacctatgcccacctgttcgacgacaaagtgatgaagcagctgaagcggcggagatacaccggctggggcaggctgagccggaagctgatcaacggcatccgggacaagcagtccggcaagacaatcctggatttcctgaagtccgacggcttcgccaacagaaacttcatgcagctgatccacgacgacagcctgacctttaaagaggacatccagaaagcccaggtgtccggccagggcgatagcctgcacgagcacattgccaatctggccggcagccccgccattaagaagggcatcctgcagacagtgaaggtggtggacgagctcgtgaaagtgatgggccggcacaagcccgagaacatcgtgatcgaaatggccagagagaaccagaccacccagaagggacagaagaacagccgcgagagaatgaagcggatcgaagagggcatcaaagagctgggcagccagatcctgaaagaacaccccgtggaaaacacccagctgcagaacgagaagctgtacctgtactacctgcagaatgggcgggatatgtacgtggaccaggaactggacatcaaccggctgtccgactacgatgtggaccatatcgtgcctcagagctttctgaaggacgactccatcgacaacaaggtgctgaccagaagcgacaaggcccggggcaagagcgacaacgtgccctccgaagaggtcgtgaagaagatgaagaactactggcggcagctgctgaacgccaagctgattacccagagaaagttcgacaatctgaccaaggccgagagaggcggcctgagcgaactggataaggccggcttcatcaagagacagctggtggaaacccggcagatcacaaagcacgtggcacagatcctggactcccggatgaacactaagtacgacgagaatgacaagctgatccgggaagtgaaagtgatcaccctgaagtccaagctggtgtccgatttccggaaggatttccagttttacaaagtgcgcgagatcaacaactaccaccacgcccacgacgcctacctgaacgccgtcgtgggaaccgccctgatcaaaaagtaccctaagctggaaagcgagttcgtgtacggcgactacaaggtgtacgacgtgcggaagatgatcgccaagagcgagcaggaaatcggcaaggctaccgccaagtacttcttctacagcaacatcatgaactttttcaagaccgagattaccctggccaacggcgagatccggaagcggcctctgatcgagacaaacggcgaaaccggggagatcgtgtgggataagggccgggattttgccaccgtgcggaaagtgctgagcatgccccaagtgaatatcgtgaaaaagaccgaggtgcagacaggcggcttcagcaaagagtctatcctgcccaagaggaacagcgataagctgatcgccagaaagaaggactgggaccctaagaagtacggcggcttcgacagccccaccgtggcctattctgtgctggtggtggccaaagtggaaaagggcaagtccaagaaactgaagagtgtgaaagagctgctggggatcaccatcatggaaagaagcagcttcgagaagaatcccatcgactttctggaagccaagggctacaaagaagtgaaaaaggacctgatcatcaagctgcctaagtactccctgttcgagctggaaaacggccggaagagaatgctggcctctgccggcgaactgcagaagggaaacgaactggccctgccctccaaatatgtgaacttcctgtacctggccagccactatgagaagctgaagggctcccccgaggataatgagcagaaacagctgtttgtggaacagcacaagcactacctggacgagatcatcgagcagatcagcgagttctccaagagagtgatcctggccgacgctaatctggacaaagtgctgtccgcctacaacaagcaccgggataagcccatcagagagcaggccgagaatatcatccacctgtttaccctgaccaatctgggagcccctgccgccttcaagtactttgacaccaccatcgaccggaagaggtacaccagcaccaaagaggtgctggacgccaccctgatccaccagagcatcaccggcctgtacgagacacggatcgacctgtctcagctgggaggtgactctggaggatctagcggaggatcctctggcagcgagacaccaggaacaagcgagtcagcaacaccagagagcagtggcggcagcagcggcggcagcagcaccctaaatatagaagatgagtatcggctacatgagacctcaaaagagccagatgtttctctagggtccacatggctgtctgattttcctcaggcctgggcggaaaccgggggcatgggactggcagttcgccaagctcctctgatcatacctctgaaagcaacctctacccccgtgtccataaaacaataccccatgtcacaagaagccagactggggatcaagccccacatacagagactgttggaccagggaatactggtaccctgccagtccccctggaacacgcccctgctacccgttaagaaaccagggactaatgattataggcctgtccaggatctgagagaagtcaacaagcgggtggaagacatccaccccaccgtgcccaacccttacaacctcttgagcgggctcccaccgtcccaccagtggtacactgtgcttgatttaaaggatgcctttttctgcctgagactccaccccaccagtcagcctctcttcgcctttgagtggagagatccagagatgggaatctcaggacaattgacctggaccagactcccacagggtttcaaaaacagtcccaccctgtttaatgaggcactgcacagagacctagcagacttccggatccagcacccagacttgatcctgctacagtacgtggatgacttactgctggccgccacttctgagctagactgccaacaaggtactcgggccctgttacaaaccctagggaacctcgggtatcgggcctcggccaagaaagcccaaatttgccagaaacaggtcaagtatctggggtatcttctaaaagagggtcagagatggctgactgaggccagaaaagagactgtgatggggcagcctactccgaagacccctcgacaactaagggagttcctagggaaggcaggcttctgtcgcctcttcatccctgggtttgcagaaatggcagcccccctgtaccctctcaccaaaccggggactctgtttaattggggcccagaccaacaaaaggcctatcaagaaatcaagcaagctcttctaactgccccagccctggggttgccagatttgactaagccctttgaactctttgtcgacgagaagcagggctacgccaaaggtgtcctaacgcaaaaactgggaccttggcgtcggccggtggcctacctgtccaaaaagctagacccagtagcagctgggtggcccccttgcctacggatggtagcagccattgccgtactgacaaaggatgcaggcaagctaaccatgggacagccactagtcattctggccccccatgcagtagaggcactagtcaaacaaccccccgaccgctggctttccaacgcccggatgactcactatcaggccttgcttttggacacggaccgggtccagttcggaccggtggtagccctgaacccggctacgctgctcccactgcctgaggaagggctgcaacacaactgccttgatatcctggccgaagcccacggaacccgacccgacctaacggaccagccgctcccagacgccgaccacacctggtacacggatggaagcagtctcttacaagagggacagcgtaaggcgggagctgcggtgaccaccgagaccgaggtaatctgggctaaagccctgccagccgggacatccgctcagcgggctgaactgatagcactcacccaggccctaaagatggcagaaggtaagaagctaaatgtttatactgatagccgttatgcttttgctactgcccatatccatggagaaatatacagaaggcgtgggtggctcacatcagaaggcaaagagatcaaaaataaagacgagatcttggccctactaaaagccctctttctgcccaaaagacttagcataatccattgtccaggacatcaaaagggacacagcgccgaggctagaggcaaccggatggctgaccaagcggcccgaaaggcagccatcacagagactccagacacctctaccctcctcatagaaaattcatcaccctctggcggctcaaaaagaaccgccgacggcagcgaattcgagcccaagaagaagaggaaagtctgattaattaagctgccttctgcggggcttgccttctggccatgcccttcttctctcccttgcacctgtacctcttggtctttgaataaagcctgagtaggaagtctag

SEQ ID NO: 3566 - RNA, 6396 nt, synthetic construct
  source 1..6396: mol_type = other RNA; note = Description of Artificial Sequence: Synthetic polynucleotide
aggaaataagagagaaaagaagagtaagaagaaatataagagccaccatggctcccaaaaagaaaaggaaggtgggcattcacggcgtgcctgcggccgacaaaaagtacagcatcggccttgatatcggcaccaatagcgtgggctgggccgttatcacagacgaatacaaggtacccagcaagaagttcaaggtgctggggaatacagacaggcactctatcaagaaaaaccttatcggggctctgctgtttgactcaggcgagaccgccgaggccaccaggttgaagaggaccgcaaggcgaaggtacacccggaggaagaacaggatctgctatctgcaggagatcttcagcaacgagatggccaaggtggacgacagcttcttccacaggctggaggagagcttccttgtcgaggaggataagaagcacgaacgacaccccatcttcggcaacatagtcgacgaggtcgcttatcacgagaagtaccccaccatctaccacctgcgaaagaaattggtggatagcaccgataaagccgacttgcgacttatctacttggctctggcgcacatgattaagttcaggggccacttcctgatcgagggcgaccttaaccccgacaacagtgacgtagacaaattgttcatccagcttgtacagacctataaccagctgttcgaggaaaaccctattaacgccagcggggtggatgcgaaggccatacttagcgccaggctgagcaaaagcaggcgcttggagaacctgatagcccagctgcccggtgaaaagaagaacggcctcttcggtaatctgattgccctgagcctgggcctgacccccaacttcaagagcaacttcgacctggcagaagatgccaagctgcagttgagtaaggacacctatgacgacgacttggacaatctgctcgcccaaatcggcgaccagtacgctgacctgttcctcgccgccaagaacctttctgacgcaatcctgcttagcgatatccttagggtgaacacagagatcaccaaggcccccctgagcgccagcatgatcaagaggtacgacgagcaccatcaggacctgacccttctgaaggccctggtgaggcagcaactgcccgagaagtacaaggagatctttttcgaccagagcaagaacggctacgccggctacatcgacggcggagccagccaagaggagttctacaagttcatcaagcccatcctggagaagatggatggcaccgaggagctgctggtgaagctgaacagggaagatttgctccggaagcagaggacctttgacaacggtagcatcccccaccagatccacctgggcgagctgcacgcaatactgaggcgacaggaggatttctaccccttcctcaaggacaatagggagaaaatcgaaaagattctgaccttcaggatcccctactacgtgggccctcttgccaggggcaacagccgattcgcttggatgacaagaaagagcgaggagaccatcaccccctggaacttcgaggaagtggtggacaaaggagcaagcgcgcagtctttcatcgaacggatgaccaatttcgacaaaaacctgcctaacgagaaggtgctgcccaagcacagcctgctttacgagtacttcaccgtgtacaacgagctcaccaaggtgaaatatgtgaccgagggcatgcgaaaacccgctttcctgagcggcgagcagaagaaggccatcgtggacctgctgttcaagaccaacaggaaggtgaccgtgaagcagctgaaggaggactacttcaagaagatcgagtgctttgatagcgtggaaataagcggcgtggaggacaggttcaacgccagcctgggcacctaccacgacttgttgaagataatcaaagacaaggatttcctggataatgaggagaacgaggatatactcgaggacatcgtgctgactttgaccctgtttgaggaccgagagatgattgaagaaaggctcaaaacctacgcccacctgttcgacgacaaagtgatgaaacaactgaagagacgaagatacaccggctggggcagactgtccaggaagctcatcaacggcattagggacaagcagagcggcaagaccatcctggatttcctgaagtccgacggcttcgccaaccgaaacttcatgcagctgattcacgatgacagcttgaccttcaaggaggacatccagaaggcccaggttagcggccagggcgactccctgcacgaacatattgcaaacctggcaggctcccctgcgatcaagaagggcatactgcagaccgttaaggttgtggacgaattggtcaaggtcatgggcaggcacaagcccgaaaacatagttatagagatggccagagagaaccagaccacccaaaagggccagaagaacagccgggagcgcatgaaaaggatcgaggagggtatcaaggaactcggaagccagatcctcaaagagcaccccgtggagaatacccagctccagaacgagaagctgtacctgtactacctgcagaacggcagggacatgtacgttgaccaggagttggacatcaacaggctttcagactatgacgtggatcacatagtgccccagagctttcttaaagacgatagcatcgacaacaaggtcctgacccgctccgacaaagccaggggcaaaagcgacaacgtgccaagcgaagaggtggttaaaaagatgaagaactactggaggcaactgctcaacgcgaaattgatcacccagagaaagttcgataacctgaccaaggccgagaggggcggactctccgaacttgacaaagcgggcttcataaagaggcagctggtcgagacccgacagatcacgaagcacgtggcccaaatcctcgacagcagaatgaataccaagtacgatgagaatgacaaactcatcagggaagtgaaagtgattaccctgaagagcaagttggtgtccgactttcgcaaagatttccagttctacaaggtgagggagatcaacaactaccaccatgcccacgacgcatacctgaacgccgtggtcggcaccgccctgattaagaagtatccaaagctggagtccgaatttgtctacggcgactacaaagtttacgatgtgaggaagatgatcgctaagagcgaacaggagatcggcaaggccaccgctaagtatttcttctacagcaacatcatgaactttttcaagaccgagatcacacttgccaacggcgaaatcaggaagaggccgcttatcgagaccaacggtgagaccggcgagatcgtgtgggacaagggcagggacttcgccaccgtgaggaaagtcctgagcatgccccaggtgaatattgtgaaaaaaactgaggtgcagacaggcggctttagcaaggaatccatcctgcccaagaggaacagcgacaagctgatcgcccggaagaaggactgggaccctaagaagtatggaggcttcgacagccccaccgtagcctacagcgtgctggtggtcgcgaaggtagagaaggggaagagcaagaaactgaagagcgtgaaggagctgctcggcataaccatcatggagaggtccagctttgagaagaaccccattgactttttggaagccaagggctacaaagaggtcaaaaaggacctgatcatcaaactccccaagtactccctgtttgaattggagaacggcagaaagaggatgctggcgagcgctggggaactgcaaaagggcaacgaactggcgctgcccagcaagtacgtgaattttctgtacctggcgtcccactacgaaaagctgaaaggcagccccgaggacaacgagcagaagcagctgttcgtggagcagcacaagcattacctggacgagataatcgagcaaatcagcgagttcagcaagagggtgattctggccgacgcgaacctggataaggtcctcagcgcctacaacaagcaccgagacaaacccatcagggagcaggccgagaatatcatacacctgttcaccctgacaaatctgggcgcacctgcggcattcaaatacttcgataccaccatcgacaggaaaaggtacactagcactaaggaggtgctggatgccaccttgatccaccagtccattaccggcctgtatgagaccaggatcgacctgagccagcttggaggcgactctggaggatctagcggaggatcctctggcagcgagacaccaggaacaagcgagtcagcaacaccagagagcagtggcggcagcagcggcggcagcagcctggacgacgagtacagactgtatagccctctggtgaagccagatcagaacattcagttctggctggaacagtttccacaggcctgggccgaaacagccggaatgggcctggccaagcaggtgcctcctcaggtgatccagctgaaggccagcgccacacctgtgtccgtgcggcagtaccctctgtccaaggaggctcaggagggcatcagacctcacgtccagcggctgatccagcaggggatcctggtgcccgtgcaaagcccttggaacacccctcttctgcccgtgagaaaacccggcacaaacgactaccggcctgtgcaggacctgagagaagtgaacaagcgggtgcaggacatccaccccacagtgccaaatccttacaacctgctttgtgccctgcccccccagcgcagctggtacaccgttctggacctgaaagatgcctttttctgtctgagacttcatcctacaagccagcccctgttcgccttcgagtggcgggatcctggcaccggccggacaggccagctgacatggaccagactgcctcagggcttcaagaacagccctaccatcttcaacgaggccctgcacagagaccttgccaacttcagaatccaacacccacaggtgaccctgctccagtacgtggatgacctgctgctggccggcgccacaaaacaagattgcctggaaggcaccaaggcccttctgctggagctgagcgacctgggatatcgggcctctgctaagaaagctcagatctgcaggagagaggtgacctacctgggctactctctgagagatggccaaagatggctgaccgaggccagaaagaaaaccgtggtgcaaatccccgctcctacaacagccaagcaggttagagagttcctgggaaaggctggattttgcagactgttcatcccaggctttgccaccctggccgcccctctgtaccccctgaccaaacctaagggcgagttcagctgggccccagagcaccagaaggcattcgacgcgatcaagaaggctctgctgtctgcccctgccctggctctgcccgacgtgacaaagcccttcaccctgtacgtggacgaacggaagggcgtggctagaggcgttctgacccagaccctgggtccttggagaaggcctgtggcctacctcagtaagaagctggatcctgtggcctctggctggcctgtgtgcctgaaggccatcgccgccgtggccattctggtcaaggatgccgataagctgaccctaggccagaatatcaccgtgatcgcccctcacgccctcgagaacatcgtgcggcagcctcccgacagatggatgaccaacgccagaatgacccactaccagagcctgttgctgaccgagagagtgaccttcgcccctccagctgccctgaatcccgccactctgctgcccgaggaaaccgacgagcctgtgacccacgactgccaccagctgctgatcgaggaaaccggcgtcagaaaggacctgacagatatccctctgaccggagaggtgctgacatggttcaccgacggcagcagctacgtcgtggaaggcaagcggatggccggcgccgctgtggtcgacggcacaagaaccatctgggcttccagcctgcctgagggcaccagcgcccagaaggccgagctgatggccctcacacaggccctgcggctggctgagggcaaaagcatcaacatctatacagacagccgttacgccttcgccacagcgcacgtgcacggcgccatctacaagcagagaggatggctgacctctgccggaagagaaatcaagaacaaggaagaaatcctgagcctgctggaagccctgcatctcccaaagagactggccatcatccactgccccggccaccagaaggccaaagaccctatcagcagaggcaaccagatggccgaccgggtggccaagcaagccgcccaaggcgtgaatctgctgccttagttaattaagctgccttctgcggggcttgccttctggccatgcccttcttctctcccttgcacctgtacctcttggtctttgaataaagcctgagtaggaagtctag

SEQ ID NO: 3567 - RNA, 21 nt, Homo sapiens
  source 1..21: mol_type = unassigned RNA
cataaagtagaaagcactact

SEQ ID NO: 3568 - RNA, 24 nt, Homo sapiens
  source 1..24: mol_type = unassigned RNA
tttggcaatggtagaactcacact

SEQ ID NO: 3569 - RNA, 21 nt, Homo sapiens
  source 1..21: mol_type = unassigned RNA
tggttctagacttgccaacta

SEQ ID NO: 3570 - RNA, 22 nt, Homo sapiens
  source 1..22: mol_type = unassigned RNA
tatggcactggtagaattcact

SEQ ID NO: 3571 - RNA, 22 nt, Homo sapiens
  source 1..22: mol_type = unassigned RNA
gtgaattaccgaagggccataa

SEQ ID NO: 3572 - RNA, 22 nt, Homo sapiens
  source 1..22: mol_type = unassigned RNA
tggagtgtgacaatggtgtttg

SEQ ID NO: 3573 - RNA, 22 nt, Homo sapiens
  source 1..22: mol_type = unassigned RNA
aacgccattatcacactaaata

SEQ ID NO: 3574 - DNA, 20 bp, synthetic construct
  source 1..20: mol_type = other DNA; note = Description of Artificial Sequence: Synthetic oligonucleotide
ggcccagactgagcacgtga

SEQ ID NO: 3575 - DNA, 76 bp, synthetic construct
  source 1..76: mol_type = other DNA; note = Description of Artificial Sequence: Synthetic oligonucleotide
gttttagagctagaaatagcaagttaaaataaggctagtccgttatcaacttgaaaaagtggcaccgagtcggtgc

SEQ ID NO: 3576 - DNA, 13 bp, synthetic construct
  source 1..13: mol_type = other DNA; note = Description of Artificial Sequence: Synthetic oligonucleotide
tctgccatcaaag

SEQ ID NO: 3577 - DNA, 117 bp, synthetic construct
  source 1..117: mol_type = other DNA; note = Description of Artificial Sequence: Synthetic polynucleotide
ggcccagactgagcacgtgagttttagagctagaaatagcaagttaaaataaggctagtccgttatcaacttgaaaaagtggcaccgagtcggtgctctgccatcaaagcgtgctca

SEQ ID NO: 3578 - DNA, 13 bp, synthetic construct
  source 1..13: mol_type = other DNA; note = Description of Artificial Sequence: Synthetic oligonucleotide
cgtgctcagtctg

SEQ ID NO: 3579 - DNA, 122 bp, synthetic construct
  source 1..122: mol_type = other DNA; note = Description of Artificial Sequence: Synthetic polynucleotide
ggcccagactgagcacgtgagttttagagctagaaatagcaagttaaaataaggctagtccgttatcaacttgaaaaagtggcaccgagtcggtgctctgccatcaaagcgtgctcagtctg

SEQ ID NO: 3580 - DNA, 17 bp, synthetic construct
  source 1..17: mol_type = other DNA; note = Description of Artificial Sequence: Synthetic oligonucleotide
cgtgctcagtctgggcc

SEQ ID NO: 3581 - DNA, 126 bp, synthetic construct
  source 1..126: mol_type = other DNA; note = Description of Artificial Sequence: Synthetic polynucleotide
ggcccagactgagcacgtgagttttagagctagaaatagcaagttaaaataaggctagtccgttatcaacttgaaaaagtggcaccgagtcggtgctctgccatcaaagcgtgctcagtctgggcc

SEQ ID NO: 3582 - DNA, 21 bp, synthetic construct
  source 1..21: mol_type = other DNA; note = Description of Artificial Sequence: Synthetic oligonucleotide
gcatggtgcacctgactcctg

SEQ ID NO: 3583 - DNA, 14 bp, synthetic construct
  source 1..14: mol_type = other DNA; note = Description of Artificial Sequence: Synthetic oligonucleotide
agacttctccacag

SEQ ID NO: 3584 - DNA, 13 bp, synthetic construct
  source 1..13: mol_type = other DNA; note = Description of Artificial Sequence: Synthetic oligonucleotide
gagtcaggtgcac

SEQ ID NO: 3585 - DNA, 124 bp, synthetic construct
  source 1..124: mol_type = other DNA; note = Description of Artificial Sequence: Synthetic polynucleotide
gcatggtgcacctgactcctggttttagagctagaaatagcaagttaaaataaggctagtccgttatcaacttgaaaaagtggcaccgagtcggtgcagacttctccacaggagtcaggtgcac

SEQ ID NO: 3586 - DNA, 21 bp, synthetic construct
  source 1..21: mol_type = other DNA; note = Description of Artificial Sequence: Synthetic oligonucleotide
gccttgataccaacctgccca

SEQ ID NO: 3587 - DNA, 20 bp, synthetic construct
  source 1..20: mol_type = other DNA; note = Description of Artificial Sequence: Synthetic oligonucleotide
gtcccctccaccccacagtg

SEQ ID NO: 3588 - RNA, 100 nt, synthetic construct
  source 1..100: mol_type = other RNA; note = Description of Artificial Sequence: Synthetic polynucleotide
  modified_base 1: mod_base = OTHER; note = 2'O-methyl guanosine phosphorothioate
  modified_base 2: mod_base = OTHER; note = 2'O-methyl cytidine phosphorothioate
  modified_base 3: mod_base = OTHER; note = 2'O-methyl adenosine phosphorothioate
  modified_base 97: mod_base = OTHER; note = 2'O-methyl uridine phosphorothioate
  modified_base 98: mod_base = OTHER; note = 2'O-methyl uridine phosphorothioate
  modified_base 99: mod_base = OTHER; note = 2'O-methyl uridine phosphorothioate
gcagaaatagactaattgcagttttagagctagaaatagcaagttaaaataaggctagtccgttatcaacttgaaaaagtggcaccgagtcggtgctttt

SEQ ID NO: 3589 - DNA, 126 bp, synthetic construct
  source 1..126: mol_type = other DNA; note = Description of Artificial Sequence: Synthetic polynucleotide
ggcccagactgagcacgtgagttttagagctagaaatagcaagttaaaataaggctagtccgttatcaacttgaaaaagtggcaccgagtcggtgctctgccatcaaagcgtgctcagtctgtttt

SEQ ID NO: 3590 - RNA, 126 nt, synthetic construct
  source 1..126: mol_type = other RNA; note = Description of Artificial Sequence: Synthetic polynucleotide
  modified_base 1: mod_base = OTHER; note = 2'O-methyl guanosine phosphorothioate
  modified_base 2: mod_base = OTHER; note = 2'O-methyl guanosine phosphorothioate
  modified_base 3: mod_base = OTHER; note = 2'O-methyl cytidine phosphorothioate
  modified_base 123: mod_base = OTHER; note = uridine phosphorothioate
  modified_base 124: mod_base = OTHER; note = 2'O-methyl uridine phosphorothioate
  modified_base 125: mod_base = OTHER; note = 2'O-methyl uridine phosphorothioate
  modified_base 126: mod_base = OTHER; note = 2'O-methyl uridine
ggcccagactgagcacgtgagttttagagctagaaatagcaagttaaaataaggctagtccgttatcaacttgaaaaagtggcaccgagtcggtgctctgccatcaaagcgtgctcagtctgtttt

SEQ ID NO: 3591 - DNA, 20 bp, synthetic construct
  source 1..20: mol_type = other DNA; note = Description of Artificial Sequence: Synthetic oligonucleotide
tctgccatcacatgtagttg

SEQ ID NO: 3592 - DNA, 133 bp, synthetic construct
  source 1..133: mol_type = other DNA; note = Description of Artificial Sequence: Synthetic polynucleotide
ggcccagactgagcacgtgagttttagagctagaaatagcaagttaaaataaggctagtccgttatcaacttgaaaaagtggcaccgagtcggtgctctgccatcacatgtagttgcgtgctcagtctgtttt

SEQ ID NO: 3593 - RNA, 133 nt, synthetic construct
  source 1..133: mol_type = other RNA; note = Description of Artificial Sequence: Synthetic polynucleotide
  modified_base 1: mod_base = OTHER; note = 2'O-methyl guanosine phosphorothioate
  modified_base 2: mod_base = OTHER; note = 2'O-methyl guanosine phosphorothioate
  modified_base 3: mod_base = OTHER; note = 2'O-methyl cytidine phosphorothioate
  modified_base 130: mod_base = OTHER; note = uridine phosphorothioate
  modified_base 131: mod_base = OTHER; note = 2'O-methyl uridine phosphorothioate
  modified_base 132: mod_base = OTHER; note = 2'O-methyl uridine phosphorothioate
  modified_base 133: mod_base = OTHER; note = 2'O-methyl uridine
ggcccagactgagcacgtgagttttagagctagaaatagcaagttaaaataaggctagtccgttatcaacttgaaaaagtggcaccgagtcggtgctctgccatcacatgtagttgcgtgctcagtctgtttt

SEQ ID NO: 3594 - DNA, 30 bp, synthetic construct
  source 1..30: mol_type = other DNA; note = Description of Artificial Sequence: Synthetic oligonucleotide
tctgccatcacatgtagttgaggtcaatga

SEQ ID NO: 3595 - DNA, 143 bp, synthetic construct
  source 1..143: mol_type = other DNA; note = Description of Artificial Sequence: Synthetic polynucleotide
ggcccagactgagcacgtgagttttagagctagaaatagcaagttaaaataaggctagtccgttatcaacttgaaaaagtggcaccgagtcggtgctctgccatcacatgtagttgaggtcaatgacgtgctcagtctgtttt

SEQ ID NO: 3596 - RNA, 143 nt, synthetic construct
  source 1..143: mol_type = other RNA; note = Description of Artificial Sequence: Synthetic polynucleotide
  modified_base 1: mod_base = OTHER; note = 2'O-methyl guanosine phosphorothioate
  modified_base 2: mod_base = OTHER; note = 2'O-methyl guanosine phosphorothioate
  modified_base 3: mod_base = OTHER; note = 2'O-methyl cytidine phosphorothioate
  modified_base 140: mod_base = OTHER; note = uridine phosphorothioate
  modified_base 141: mod_base = OTHER; note = 2'O-methyl uridine phosphorothioate
  modified_base 142: mod_base = OTHER; note = 2'O-methyl uridine phosphorothioate
  modified_base 143: mod_base = OTHER; note = 2'O-methyl uridine
ggcccagactgagcacgtgagttttagagctagaaatagcaagttaaaataaggctagtccgttatcaacttgaaaaagtggcaccgagtcggtgctctgccatcacatgtagttgaggtcaatgacgtgctcagtctgtttt

SEQ ID NO: 3597 - DNA, 33 bp, synthetic construct
  source 1..33: mol_type = other DNA; note = Description of Artificial Sequence: Synthetic oligonucleotide
ggaagcagggcttcctttcctctgccatcaaag

SEQ ID NO: 3598 - DNA, 146 bp, synthetic construct
  source 1..146: mol_type = other DNA; note = Description of Artificial Sequence: Synthetic polynucleotide
ggcccagactgagcacgtgagttttagagctagaaatagcaagttaaaataaggctagtccgttatcaacttgaaaaagtggcaccgagtcggtgcggaagcagggcttcctttcctctgccatcaaagcgtgctcagtctgtttt

SEQ ID NO: 3599 - RNA, 146 nt, synthetic construct
  source 1..146: mol_type = other RNA; note = Description of Artificial Sequence: Synthetic polynucleotide
  modified_base 1: mod_base = OTHER; note = 2'O-methyl guanosine phosphorothioate
  modified_base 2: mod_base = OTHER; note = 2'O-methyl guanosine phosphorothioate
  modified_base 3: mod_base = OTHER; note = 2'O-methyl cytidine phosphorothioate
  modified_base 143: mod_base = OTHER; note = uridine phosphorothioate
  modified_base 144: mod_base = OTHER; note = 2'O-methyl uridine phosphorothioate
  modified_base 145: mod_base = OTHER; note = 2'O-methyl uridine phosphorothioate
  modified_base 146: mod_base = OTHER; note = 2'O-methyl uridine
ggcccagactgagcacgtgagttttagagctagaaatagcaagttaaaataaggctagtccgttatcaacttgaaaaagtggcaccgagtcggtgcggaagcagggcttcctttcctctgccatcaaagcgtgctcagtctgtttt

SEQ ID NO: 3600 - DNA, 40 bp, synthetic construct
  source 1..40: mol_type = other DNA; note = Description of Artificial Sequence: Synthetic oligonucleotide
ggaagcagggcttcctttcctctgccatcacatgtagttg

SEQ ID NO: 3601 - DNA, 153 bp, synthetic construct
  source 1..153: mol_type = other DNA; note = Description of Artificial Sequence: Synthetic polynucleotide
ggcccagactgagcacgtgagttttagagctagaaatagcaagttaaaataaggctagtccgttatcaacttgaaaaagtggcaccgagtcggtgcggaagcagggcttcctttcctctgccatcacatgtagttgcgtgctcagtctgtttt

SEQ ID NO: 3602 - RNA, 153 nt, synthetic construct
  source 1..153: mol_type = other RNA; note = Description of Artificial Sequence: Synthetic polynucleotide
  modified_base 1: mod_base = OTHER; note = 2'O-methyl guanosine phosphorothioate
  modified_base 2: mod_base = OTHER; note = 2'O-methyl guanosine phosphorothioate
  modified_base 3: mod_base = OTHER; note = 2'O-methyl cytidine phosphorothioate
  modified_base 150: mod_base = OTHER; note = uridine phosphorothioate
  modified_base 151: mod_base = OTHER; note = 2'O-methyl uridine phosphorothioate
  modified_base 152: mod_base = OTHER; note = 2'O-methyl uridine phosphorothioate
  modified_base 153: mod_base = OTHER; note = 2'O-methyl uridine
ggcccagactgagcacgtgagttttagagctagaaatagcaagttaaaataaggctagtccgttatcaacttgaaaaagtggcaccgagtcggtgcggaagcagggcttcctttcctctgccatcacatgtagttgcgtgctcagtctgtttt

SEQ ID NO: 3603 - DNA, 50 bp, synthetic construct
  source 1..50: mol_type = other DNA; note = Description of Artificial Sequence: Synthetic oligonucleotide
ggaagcagggcttcctttcctctgccatcacatgtagttgaggtcaatga

SEQ ID NO: 3604 - DNA, 163 bp, synthetic construct
  source 1..163: mol_type = other DNA; note = Description of Artificial Sequence: Synthetic polynucleotide
ggcccagactgagcacgtgagttttagagctagaaatagcaagttaaaataaggctagtccgttatcaacttgaaaaagtggcaccgagtcggtgcggaagcagggcttcctttcctctgccatcacatgtagttgaggtcaatgacgtgctcagtctgtttt

SEQ ID NO: 3605 - RNA, 163 nt, synthetic construct
  source 1..163: mol_type = other RNA; note = Description of Artificial Sequence: Synthetic polynucleotide
  modified_base 1: mod_base = OTHER; note = 2'O-methyl guanosine phosphorothioate
  modified_base 2: mod_base = OTHER; note = 2'O-methyl guanosine phosphorothioate
  modified_base 3: mod_base = OTHER; note = 2'O-methyl cytidine phosphorothioate
  modified_base 160: mod_base = OTHER; note = uridine phosphorothioate
  modified_base 161: mod_base = OTHER; note = 2'O-methyl uridine phosphorothioate
  modified_base 162: mod_base = OTHER; note = 2'O-methyl uridine phosphorothioate
  modified_base 163: mod_base = OTHER; note = 2'O-methyl uridine
ggcccagactgagcacgtgagttttagagctagaaatagcaagttaaaataaggctagtccgttatcaacttgaaaaagtggcaccgagtcggtgcggaagcagggcttcctttcctctgccatcacatgtagttgaggtcaatgacgtgctcagtctgtttt

SEQ ID NO: 3606 - DNA, 47 bp, synthetic construct
  source 1..47: mol_type = other DNA; note = Description of Artificial Sequence: Synthetic oligonucleotide
aggaaataagagagaaaagaagagtaagaagaaatataagagccacc

SEQ ID NO: 3607 - DNA, 101 bp, synthetic construct
  source 1..101: mol_type = other DNA; note = Description of Artificial Sequence: Synthetic polynucleotide
gctggagcctcggtggccatgcttcttgccccttgggcctccccccagcccctcctccccttcctgcacccgtacccccgtggtctttgaataaagtctga

SEQ ID NO: 3608 - DNA, 47 bp, synthetic construct
  source 1..47: mol_type = other DNA; note = Description of Artificial Sequence: Synthetic oligonucleotide
gggaaataagagagaaaagaagagtaagaagaaatataagagccacc

SEQ ID NO: 3609 - DNA, 97 bp, synthetic construct
  source 1..97: mol_type = other DNA; note = Description of Artificial Sequence: Synthetic oligonucleotide
gctgccttctgcggggcttgccttctggccatgcccttcttctctcccttgcacctgtacctcttggtctttgaataaagcctgagtaggaagtcta

SEQ ID NO: 3610 - protein, 31 aa, synthetic construct
  source 1..31: note = Description of Artificial Sequence: Synthetic polypeptide
WTVLPQGFKNSPTLFDEALARDLADFRIQHP

SEQ ID NO: 3611 - protein, 31 aa, Gammaretrovirus sp.
WTRLPQGFKNSPTLFDEALHRDLADFRIQHP

SEQ ID NO: 3612 - protein, 31 aa, Gammaretrovirus sp.
WTRLPQGFKNSPTLFDEALNRDLQGFRLDHP

SEQ ID NO: 3613 - protein, 31 aa, Gammaretrovirus sp.
WTRLPQGFKNSPTIFDEALHRDLANFRIQHP

SEQ ID NO: 3614 - protein, 31 aa, Epsilonretrovirus sp.
WTVLPQGFIHSPTLFSQALYQSLHKIKFKIS

SEQ ID NO: 3615 - protein, 31 aa, Deltaretrovirus sp.
WRVLPQGFINSPALFERALQEPLRQVSAAFS

SEQ ID NO: 3616 - protein, 31 aa, Deltaretrovirus sp.
WRVLPQGFKNSPTLFEMQLAHILQPIRQAFP

SEQ ID NO: 3617 - protein, 31 aa, Deltaretrovirus sp.
WKVLPQGFKNSPTLFEMQLAHILQPIRQAFP

SEQ ID NO: 3618 - protein, 31 aa, Deltaretrovirus sp.
WTVLPQGFKNSPTLFEQQLAAVLNPMRKMFP

SEQ ID NO: 3619 - protein, 31 aa, Betaretrovirus sp.
WKVLPQGMANSPTLCQKYVATAIHKVRHAWK

SEQ ID NO: 3620 - protein, 31 aa, Betaretrovirus sp.
WKVLPQGMKNSPTLCQKFVDKAILTVRDKYQ

SEQ ID NO: 3621 - protein, 31 aa, Betaretrovirus sp.
WKVLPQGMANSPTLCQKFVAAAIAPVRAQWP

SEQ ID NO: 3622 - protein, 27 aa, Spumavirus sp.
WTRLPQGFLNSPALFTADVVDLLKEIP

SEQ ID NO: 3623 - protein, 29 aa, synthetic construct
  source 1..29: note = Description of Artificial Sequence: Synthetic peptide
  VARIANT 10: note = A, Q, K, H, or V
  VARIANT 19: note = G, K, D, I, H, Y, or A
  VARIANT 23: note = L, P, I, Q, C, H, T, V, F, Y, or absent
  VARIANT 27: note = G, A, D, S, N, or T
WIPGFAELLXPLYPLLKGXTDPXISLXPE

SEQ ID NO: 3624 - protein, 27 aa, Gammaretrovirus sp.
WIPGFAEMAAPLYPLTKTGTLFNWGPD

SEQ ID NO: 3625 - protein, 28 aa, Gammaretrovirus sp.
WIPGFAELAQPLYAATRGGNDPLVWGEK

SEQ ID NO: 3626 - protein, 27 aa, Gammaretrovirus sp.
WIPGFATLAAPLYPLTKEKGEFSWAPE

SEQ ID NO: 3627 - protein, 27 aa, Gammaretrovirus sp.
WIPGFAEMAAPLYPLTKTGTLFSWGPD

SEQ ID NO: 3628 - protein, 29 aa, Epsilonretrovirus sp.
WIPEFSIHSKFLEKQLKKDTAEPFQLDDQ

SEQ ID NO: 3629 - protein, 31 aa, Deltaretrovirus sp.
GTPTTRRPLQLLYSSLKGIDDPRAIIHLSPE

SEQ ID NO: 3630 - protein, 31 aa, Deltaretrovirus sp.
GTPTLRQPLHSLYCALQRHTDPRDQIYLNPS

SEQ ID NO: 3631 - protein, 31 aa, Deltaretrovirus sp.
GTPILRKHLQSLYSALHGYRDPRACITLTPQ

SEQ ID NO: 3632 - protein, 31 aa, Betaretrovirus sp.
YLKLTTGDLKPLFDTLKGDSDPNSHRSLSKE

SEQ ID NO: 3633 - protein, 31 aa, Betaretrovirus sp.
FLKLTTGELKPLFEILNGDSNPISTRKLTPE

SEQ ID NO: 3634 - protein, 31 aa, Betaretrovirus sp.
YLKLPTSALVPLNNILKGDPNPLSVRALTPE

SEQ ID NO: 3635 - protein, 29 aa, Spumavirus sp.
FIPNYSELVKPLYTIVANANGKFISWTED

SEQ ID NO: 3636 - protein, 29 aa, Spumavirus sp.
FIPNFAELVQPLYNLIASAKGKYIEWSEE

SEQ ID NO: 3637 - protein, 24 aa, synthetic construct
  source 1..24: note = Description of Artificial Sequence: Synthetic peptide
  VARIANT 6: note = I, V, D, T, S, L, E, or K
  VARIANT 16: note = E, A, P, Q, G, H, or S
  VARIANT 21: note = D, N, P, E, S, K, A, Q, Y, or T
FATAHXLGGLTSAGKXIKNKXEIL

SEQ ID NO: 3638 - protein, 31 aa, Gammaretrovirus sp.
FATAHIHGEIYRRRGLLTSEGKEIKNKDEIL

SEQ ID NO: 3639 - protein, 31 aa, Gammaretrovirus sp.
FATAHVHGEIYRRRGLLTSEGREIKNKNEIL

SEQ ID NO: 3640 - protein, 31 aa, Gammaretrovirus sp.
FATIHVHGMIYRERGLLTAGGKAIKNAPEIL

SEQ ID NO: 3641 - protein, 31 aa, Gammaretrovirus sp.
FATAHVHGAIYKQRGLLTSAGREIKNKEEIL

SEQ ID NO: 3642 - protein, 31 aa, Gammaretrovirus sp.
FATAHIHGEIYRRRGLLTSEGREIKNKSEIL

SEQ ID NO: 3643 - protein, 31 aa, Epsilonretrovirus sp.
YGVVHDFGHLWMHRGFVTSAGTPIKNHKEIE

SEQ ID NO: 3644 - protein, 22 aa, Deltaretrovirus sp.
YSLLRTLVLGAWLQPDPVPSYA

SEQ ID NO: 3645 - protein, 22 aa, Deltaretrovirus sp.
YHYLRTLALGTFQGRSSQAPFQ

SEQ ID NO: 3646 - protein, 22 aa, Deltaretrovirus sp.
IKYLHSLAIGAFLGTSAHQTLQ

SEQ ID NO: 3647 - protein, 23 aa, Betaretrovirus sp.
AHSIPLLETVAQIKHISETAKLF

SEQ ID NO: 3648 - protein, 22 aa, Betaretrovirus sp.
TGLFPEIETATLSPRTKIYTEL

SEQ ID NO: 3649 - protein, 23 aa, Betaretrovirus sp.
AQSVPLLETVPFIKSSTNATPLF

SEQ ID NO: 3650 - protein, 31 aa, Spumavirus sp.
AESANKELPYWKSNGFLNNKKKPLRHVSKWK

SEQ ID NO: 3651 - protein, 31 aa, Spumavirus sp.
AESANKELPYWKSNGFVNNKKKPLKHISKWK

SEQ ID NO: 3652 - protein, 30 aa, synthetic construct
  source 1..30: note = Description of Artificial Sequence: Synthetic polypeptide
  VARIANT 29: note = A, Q, K, H, or V
PKTLRQLQEFLGTIGWCRLWIPGFAELLXP

SEQ ID NO: 3653 - protein, 30 aa, Gammaretrovirus sp.
PKTPRQLREFLGTAGFCRLWIPGFAEMAAP

SEQ ID NO: 3654 - protein, 30 aa, Gammaretrovirus sp.
PKTKRQVREFLGTIGYCRLWIPGFAELAQP

SEQ ID NO: 3655 - protein, 30 aa, Gammaretrovirus sp.
PTTAKQVREFLGTAGFCRLWIPGFATLAAP

SEQ ID NO: 3656 - protein, 30 aa, Epsilonretrovirus sp.
PTTIRQIRAFLGLVGYCRHWIPEFSIHSKF

SEQ ID NO: 3657 - protein, 30 aa, Deltaretrovirus sp.
PISLHQLQTVLGDLQWVSRGTPTTRRPLQL

SEQ ID NO: 3658 - protein, 30 aa, Deltaretrovirus sp.
RWALPELQALLGEIQWVSKGTPTLRQPLHS

SEQ ID NO: 3659 - protein, 30 aa, Deltaretrovirus sp.
QWTLTELQVILGEIQWVSKGTPILRKHLQS

SEQ ID NO: 3660 - protein, 30 aa, Betaretrovirus sp.
LQTLNDFQKLLGDINWLRPYLKLTTGDLKP

SEQ ID NO: 3661 - protein, 30 aa, Betaretrovirus sp.
LRTLNDFQKLLGNINWIRPFLKLTTGELKP

SEQ ID NO: 3662 - protein, 30 aa, Betaretrovirus sp.
LKTLNDFQKLLGDIQWLRPYLKLPTSALVP

SEQ ID NO: 3663 - RNA, 100 nt, synthetic construct; identical to SEQ ID NO: 1683
  source 1..100: mol_type = other RNA
  misc_difference 1..100: note = This sequence may encompass 5, 10, 20, 30, 40, 50, 60, 70, 80, 90, or 100 nucleotides

SEQ ID NO: 3664 - RNA, 30 nt, synthetic construct
  source 1..30: mol_type = other RNA
  misc_difference 1..30: note = This sequence may encompass 5, 10, 20, or 30 nucleotides
aaaaaaaaaaaaaaaaaaaaaaaaaaaaaa

SEQ ID NO: 3665 - protein, 2094 aa, synthetic construct
MAPKKKRKVGIHGVPAADKKYSIGLDIGTNSVGWAVITDEYKVPSKKFKVLGNTDRHSIKKNLIGALLFDSGETAEATRLKRTARRRYTRRKNRICYLQEIFSNEMAKVDDSFFHRLEESFLVEEDKKHERHPIFGNIVDEVAYHEKYPTIYHLRKKLVDSTDKADLRLIYLALAHMIKFRGHFLIEGDLNPDNSDVDKLFIQLVQTYNQLFEENPINASGVDAKAILSARLSKSRRLENLIAQLPGEKKNGLFGNLIALSLGLTPNFKSNFDLAEDAKLQLSKDTYDDDLDNLLAQIGDQYADLFLAAKNLSDAILLSDILRVNTEITKAPLSASMIKRYDEHHQDLTLLKALVRQQLPEKYKEIFFDQSKNGYAGYIDGGASQEEFYKFIKPILEKMDGTEELLVKLNREDLLRKQRTFDNGSIPHQIHLGELHAILRRQEDFYPFLKDNREKIEKILTFRIPYYVGPLARGNSRFAWMTRKSEETITPWNFEEVVDKGASAQSFIERMTNFDKNLPNEKVLPKHSLLYEYFTVYNELTKVKYVTEGMRKPAFLSGEQKKAIVDLLFKTNRKVTVKQLKEDYFKKIECFDSVEISGVEDRFNASLGTYHDLLKIIKDKDFLDNEENEDILEDIVLTLTLFEDREMIEERLKTYAHLFDDKVMKQLKRRRYTGWGRLSRKLINGIRDKQSGKTILDFLKSDGFANRNFMQLIHDDSLTFKEDIQKAQVSGQGDSLHEHIANLAGSPAIKKGILQTVKVVDELVKVMGRHKPENIVIEMARENQTTQKGQKNSRERMKRIEEGIKELGSQILKEHPVENTQLQNEKLYLYYLQNGRDMYVDQELDINRLSDYDVDHIVPQSFLKDDSIDNKVLTRSDKARGKSDNVPSEEVVKKMKNYWRQLLNAKLITQRKFDNLTKAERGGLSELDKAGFIKRQLVETRQITKHVAQILDSRMNTKYDENDKLIREVKVITLKSKLVSDFRKDFQFYKVREINNYHHAHDAYLNAVVGTALIKKYPKLESEFVYGDYKVYDVRKMIAKSEQEIGKATAKYFFYSNIMNFFKTEITLANGEIRKRPLIETNGETGEIVWDKGRDFATVRKVLSMPQVNIVKKTEVQTGGFSKESILPKRNSDKLIARKKDWDPKKYGGFDSPTVAYSVLVVAKVEKGKSKKLKSVKELLGITIMERSSFEKNPIDFLEAKGYKEVKKDLIIKLPKYSLFELENGRKRMLASAGELQKGNELALPSKYVNFLYLASHYEKLKGSPEDNEQKQLFVEQHKHYLDEIIEQISEFSKRVILADANLDKVLSAYNKHRDKPIREQAENIIHLFTLTNLGAPAAFKYFDTTIDRKRYTSTKEVLDATLIHQSITGLYETRIDLSQLGGDSGGSSGGSSGSETPGTSESATPESSGGSSGGSSTLNIEDEYRLHETSKEPDVSLGSTWLSDFPQAWAETGGMGLAVRQAPLIIPLKATSTPVSIKQYPMSQEARLGIKPHIQRLLDQGILVPCQSPWNTPLLPVKKPGTNDYRPVQDLREVNKRVEDIHPTVPNPYNLLSGLPPSHQWYTVLDLKDAFFCLRLHPTSQPLFAFEWRDPEMGISGQLTWTRLPQGFKNSPTLFNEALHRDLADFRIQHPDLILLQYVDDLLLAATSELDCQQGTRALLQTLGNLGYRASAKKAQICQKQVKYLGYLLKEGQRWLTEARKETVMGQPTPKTPRQLREFLGKAGFCRLFIPGFAEMAAPLYPLTKPGTLFNWGPDQQKAYQEIKQALLTAPALGLPDLTKPFELFVDEKQGYAKGVLTQKLGPWRRPVAYLSKKLDPVAAGWPPCLRMVAAIAVLTKDAGKLTMGQPLVILAPHAVEALVKQPPDRWLSNARMTHYQALLLDTDRVQFGPVVALNPATLLPLPEEGLQHNCLDILAEAHGTRPDLTDQPLPDADHTWYTDGSSLLQEGQRKAGAAVTTETEVIWAKALPAGTSAQRAELIALTQALKMAEGKKLNVYTDSRYAFATAHIHGEIYRRRGWLTSEGKEIKNKDEILALLKALFLPKRLSIIHCPGHQKGHSAEARGNRMADQAARKAAITETPDTSTLLIENSSP

SEQ ID NO: 3666 - protein, 2117 aa, synthetic construct; identical to SEQ ID NO: 3560

SEQ ID NO: 3667 - protein, 2122 aa, synthetic construct
MPAAKRVKLDGGDKKYSIGLDIGTNSVGWAVITDEYKVPSKKFKVLGNTDRHSIKKNLIGALLFDSGETAEATRLKRTARRRYTRRKNRICYLQEIFSNEMAKVDDSFFHRLEESFLVEEDKKHERHPIFGNIVDEVAYHEKYPTIYHLRKKLVDSTDKADLRLIYLALAHMIKFRGHFLIEGDLNPDNSDVDKLFIQLVQTYNQLFEENPINASGVDAKAILSARLSKSRRLENLIAQLPGEKKNGLFGNLIALSLGLTPNFKSNFDLAEDAKLQLSKDTYDDDLDNLLAQIGDQYADLFLAAKNLSDAILLSDILRVNTEITKAPLSASMIKRYDEHHQDLTLLKALVRQQLPEKYKEIFFDQSKNGYAGYIDGGASQEEFYKFIKPILEKMDGTEELLVKLNREDLLRKQRTFDNGSIPHQIHLGELHAILRRQEDFYPFLKDNREKIEKILTFRIPYYVGPLARGNSRFAWMTRKSEETITPWNFEEVVDKGASAQSFIERMTNFDKNLPNEKVLPKHSLLYEYFTVYNELTKVKYVTEGMRKPAFLSGEQKKAIVDLLFKTNRKVTVKQLKEDYFKKIECFDSVEISGVEDRFNASLGTYHDLLKIIKDKDFLDNEENEDILEDIVLTLTLFEDREMIEERLKTYAHLFDDKVMKQLKRRRYTGWGRLSRKLINGIRDKQSGKTILDFLKSDGFANRNFMQLIHDDSLTFKEDIQKAQVSGQGDSLHEHIANLAGSPAIKKGILQTVKVVDELVKVMGRHKPENIVIEMARENQTTQKGQKNSRERMKRIEEGIKELGSQILKEHPVENTQLQNEKLYLYYLQNGRDMYVDQELDINRLSDYDVDHIVPQSFLKDDSIDNKVLTRSDKARGKSDNVPSEEVVKKMKNYWRQLLNAKLITQRKFDNLTKAERGGLSELDKAGFIKRQLVETRQITKHVAQILDSRMNTKYDENDKLIREVKVITLKSKLVSDFRKDFQFYKVREINNYHHAHDAYLNAVVGTALIKKYPKLESEFVYGDYKVYDVRKMIAKSEQEIGKATAKYFFYSNIMNFFKTEITLANGEIRKRPLIETNGETGEIVWDKGRDFATVRKVLSMPQVNIVKKTEVQTGGFSKESILPKRNSDKLIARKKDWDPKKYGGFDSPTVAYSVLVVAKVEKGKSKKLKSVKELLGITIMERSSFEKNPIDFLEAKGYKEVKKDLIIKLPKYSLFELENGRKRMLASAGELQKGNELALPSKYVNFLYLASHYEKLKGSPEDNEQKQLFVEQHKHYLDEIIEQISEFSKRVILADANLDKVLSAYNKHRDKPIREQAENIIHLFTLTNLGAPAAFKYFDTTIDRKRYTSTKEVLDATLIHQSITGLYETRIDLSQLGGDSGGSSGGSSGSETPGTSESATPESSGGSSGGSSTLNIEDEYRLHETSKEPDVSLGSTWLSDFPQAWAETGGMGLAVRQAPLIIPLKATSTPVSIKQYPMSQEARLGIKPHIQRLLDQGILVPCQSPWNTPLLPVKKPGTNDYRPVQDLREVNKRVEDIHPTVPNPYNLLSGLPPSHQWYTVLDLKDAFFCLRLHPTSQPLFAFEWRDPEMGISGQLTWTRLPQGFKNSPTLFNEALHRDLADFRIQHPDLILLQYVDDLLLAATSELDCQQGTRALLQTLGNLGYRASAKKAQICQKQVKYLGYLLKEGQRWLTEARKETVMGQPTPKTPRQLREFLGKAGFCRLFIPGFAEMAAPLYPLTKPGTLFNWGPDQQKAYQEIKQALLTAPALGLPDLTKPFELFVDEKQGYAKGVLTQKLGPWRRPVAYLSKKLDPVAAGWPPCLRMVAAIAVLTKDAGKLTMGQPLVILAPHAVEALVKQPPDRWLSNARMTHYQALLLDTDRVQFGPVVALNPATLLPLPEEGLQHNCLDILAEAHGTRPDLTDQPLPDADHTWYTDGSSLLQEGQRKAGAAVTTETEVIWAKALPAGTSAQRAELIALTQALKMAEGKKLNVYTDSRYAFATAHIHGEIYRRRGWLTSEGKEIKNKDEILALLKALFLPKRLSIIHCPGHQKGHSAEARGNRMADQAARKAAITETPDTSTLLIENSSPSGGSKRTADGSEFEKRTADGSEFESPKKKAKVE

SEQ ID NO: 3668 - protein, 2158 aa, synthetic construct
MPAAKRVKLDGGDKKYSIGLDIGTNSVGWAVITDEYKVPSKKFKVLGNTDRHSIKKNLIGALLFDSGETAEATRLKRTARRRYTRRKNRICYLQEIFSNEMAKVDDSFFHRLEESFLVEEDKKHERHPIFGNIVDEVAYHEKYPTIYHLRKKLVDSTDKADLRLIYLALAHMIKFRGHFLIEGDLNPDNSDVDKLFIQLVQTYNQLFEENPINASGVDAKAILSARLSKSRRLENLIAQLPGEKKNGLFGNLIALSLGLTPNFKSNFDLAEDAKLQLSKDTYDDDLDNLLAQIGDQYADLFLAAKNLSDAILLSDILRVNTEITKAPLSASMIKRYDEHHQDLTLLKALVRQQLPEKYKEIFFDQSKNGYAGYIDGGASQEEFYKFIKPILEKMDGTEELLVKLNREDLLRKQRTFDNGSIPHQIHLGELHAILRRQEDFYPFLKDNREKIEKILTFRIPYYVGPLARGNSRFAWMTRKSEETITPWNFEEVVDKGASAQSFIERMTNFDKNLPNEKVLPKHSLLYEYFTVYNELTKVKYVTEGMRKPAFLSGEQKKAIVDLLFKTNRKVTVKQLKEDYFKKIECFDSVEISGVEDRFNASLGTYHDLLKIIKDKDFLDNEENEDILEDIVLTLTLFEDREMIEERLKTYAHLFDDKVMKQLKRRRYTGWGRLSRKLINGIRDKQSGKTILDFLKSDGFANRNFMQLIHDDSLTFKEDIQKAQVSGQGDSLHEHIANLAGSPAIKKGILQTVKVVDELVKVMGRHKPENIVIEMARENQTTQKGQKNSRERMKRIEEGIKELGSQILKEHPVENTQLQNEKLYLYYLQNGRDMYVDQELDINRLSDYDVDHIVPQSFLKDDSIDNKVLTRSDKARGKSDNVPSEEVVKKMKNYWRQLLNAKLITQRKFDNLTKAERGGLSELDKAGFIKRQLVETRQITKHVAQILDSRMNTKYDENDKLIREVKVITLKSKLVSDFRKDFQFYKVREINNYHHAHDAYLNAVVGTALIKKYPKLESEFVYGDYKVYDVRKMIAKSEQEIGKATAKYFFYSNIMNFFKTEITLANGEIRKRPLIETNGETGEIVWDKGRDFATVRKVLSMPQVNIVKKTEVQTGGFSKESILPKRNSDKLIARKKDWDPKKYGGFDSPTVAYSVLVVAKVEKGKSKKLKSVKELLGITIMERSSFEKNPIDFLEAKGYKEVKKDLIIKLPKYSLFELENGRKRMLASAGELQKGNELALPSKYVNFLYLASHYEKLKGSPEDNEQKQLFVEQHKHYLDEIIEQISEFSKRVILADANLDKVLSAYNKHRDKPIREQAENIIHLFTLTNLGAPAAFKYFDTTIDRKRYTSTKEVLDATLIHQSITGLYETRIDLSQLGGDGGSGGSSGGSSGSETPGTSESATPESSGGSSGGSSGGTLNIEDEYRLHETSKEPDVSLGSTWLSDFPQAWAETGGMGLAVRQAPLIIPLKATSTPVSIKQYPMSQEARLGIKPHIQRLLDQGILVPCQSPWNTPLLPVKKPGTNDYRPVQDLREVNKRVEDIHPTVPNPYNLLSGLPPSHQWYTVLDLKDAFFCLRLHPTSQPLFAFEWRDPEMGISGQLTWTRLPQGFKNSPTLFNEALHRDLADFRIQHPDLILLQYVDDLLLAATSELDCQQGTRALLQTLGNLGYRASAKKAQICQKQVKYLGYLLKEGQRWLTEARKETVMGQPTPKTPRQLREFLGKAGFCRLFIPGFAEMAAPLYPLTKPGTLFNWGPDQQKAYQEIKQALLTAPALGLPDLTKPFELFVDEKQGYAKGVLTQKLGPWRRPVAYLSKKLDPVAAGWPPCLRMVAAIAVLTKDAGKLTMGQPLVILAPHAVEALVKQPPDRWLSNARMTHYQALLLDTDRVQFGPVVALNPATLLPLPEEGLQHNCLDILAEAHGTRPDLTDQPLPDADHTWYTDGSSLLQEGQRKAGAAVTTETEVIWAKALPAGTSAQRAELIALTQALKMAEGKKLNVYTDSRYAFATAHIHGEIYRRRGWLTSEGKEIKNKDEILALLKALFLPKRLSIIHCPGHQKGHSAEARGNRMADQAARKAAITETPDTSTLLIENSSPSGGSKRTADGSEFEAGKRTADGSEFEKRTADGSEFESPKKKAKVEGSGEGRGSLLTCGDVEENPG

SEQ ID NO: 3669 - protein, 2136 aa, synthetic construct
MPAAKRVKLDGGDKKYSIGLDIGTNSVGWAVITDEYKVPSKKFKVLGNTDRHSIKKNLIGALLFDSGETAEATRLKRTARRRYTRRKNRICYLQEIFSNEMAKVDDSFFHRLEESFLVEEDKKHERHPIFGNIVDEVAYHEKYPTIYHLRKKLVDSTDKADLRLIYLALAHMIKFRGHFLIEGDLNPDNSDVDKLFIQLVQTYNQLFEENPINASGVDAKAILSARLSKSRRLENLIAQLPGEKKNGLFGNLIALSLGLTPNFKSNFDLAEDAKLQLSKDTYDDDLDNLLAQIGDQYADLFLAAKNLSDAILLSDILRVNTEITKAPLSASMIKRYDEHHQDLTLLKALVRQQLPEKYKEIFFDQSKNGYAGYIDGGASQEEFYKFIKPILEKMDGTEELLVKLNREDLLRKQRTFDNGSIPHQIHLGELHAILRRQEDFYPFLKDNREKIEKILTFRIPYYVGPLARGNSRFAWMTRKSEETITPWNFEEVVDKGASAQSFIERMTNFDKNLPNEKVLPKHSLLYEYFTVYNELTKVKYVTEGMRKPAFLSGEQKKAIVDLLFKTNRKVTVKQLKEDYFKKIECFDSVEISGVEDRFNASLGTYHDLLKIIKDKDFLDNEENEDILEDIVLTLTLFEDREMIEERLKTYAHLFDDKVMKQLKRRRYTGWGRLSRKLINGIRDKQSGKTILDFLKSDGFANRNFMQLIHDDSLTFKEDIQKAQVSGQGDSLHEHIANLAGSPAIKKGILQTVKVVDELVKVMGRHKPENIVIEMARENQTTQKGQKNSRERMKRIEEGIKELGSQILKEHPVENTQLQNEKLYLYYLQNGRDMYVDQELDINRLSDYDVDHIVPQSFLKDDSIDNKVLTRSDKARGKSDNVPSEEVVKKMKNYWRQLLNAKLITQRKFDNLTKAERGGLSELDKAGFIKRQLVETRQITKHVAQILDSRMNTKYDENDKLIREVKVITLKSKLVSDFRKDFQFYKVREINNYHHAHDAYLNAVVGTALIKKYPKLESEFVYGDYKVYDVRKMIAKSEQEIGKATAKYFFYSNIMNFFKTEITLANGEIRKRPLIETNGETGEIVWDKGRDFATVRKVLSMPQVNIVKKTEVQTGGFSKESILPKRNSDKLIARKKDWDPKKYGGFDSPTVAYSVLVVAKVEKGKSKKLKSVKELLGITIMERSSFEKNPIDFLEAKGYKEVKKDLIIKLPKYSLFELENGRKRMLASAGELQKGNELALPSKYVNFLYLASHYEKLKGSPEDNEQKQLFVEQHKHYLDEIIEQISEFSKRVILADANLDKVLSAYNKHRDKPIREQAENIIHLFTLTNLGAPAAFKYFDTTIDRKRYTSTKEVLDATLIHQSITGLYETRIDLSQLGGDGGPAPAPAPAPAPGGTLNIEDEYRLHETSKEPDVSLGSTWLSDFPQAWAETGGMGLAVRQAPLIIPLKATSTPVSIKQYPMSQEARLGIKPHIQRLLDQGILVPCQSPWNTPLLPVKKPGTNDYRPVQDLREVNKRVEDIHPTVPNPYNLLSGLPPSHQWYTVLDLKDAFFCLRLHPTSQPLFAFEWRDPEMGISGQLTWTRLPQGFKNSPTLFNEALHRDLADFRIQHPDLILLQYVDDLLLAATSELDCQQGTRALLQTLGNLGYRASAKKAQICQKQVKYLGYLLKEGQRWLTEARKETVMGQPTPKTPRQLREFLGKAGFCRLFIPGFAEMAAPLYPLTKPGTLFNWGPDQQKAYQEIKQALLTAPALGLPDLTKPFELFVDEKQGYAKGVLTQKLGPWRRPVAYLSKKLDPVAAGWPPCLRMVAAIAVLTKDAGKLTMGQPLVILAPHAVEALVKQPPDRWLSNARMTHYQALLLDTDRVQFGPVVALNPATLLPLPEEGLQHNCLDILAEAHGTRPDLTDQPLPDADHTWYTDGSSLLQEGQRKAGAAVTTETEVIWAKALPAGTSAQRAELIALTQALKMAEGKKLNVYTDSRYAFATAHIHGEIYRRRGWLTSEGKEIKNKDEILALLKALFLPKRLSIIHCPGHQKGHSAEARGNRMADQAARKAAITETPDTSTLLIENSSPSGGSKRTADGSEFEAGKRTADGSEFEKRTADGSEFESPKKKAKVEGSGEGRGSLLTCGDVEENPG

SEQ ID NO: 3670 - protein, 2131 aa, synthetic construct
MPAAKRVKLDGGDKKYSIGLDIGTNSVGWAVITDEYKVPSKKFKVLGNTDRHSIKKNLIGALLFDSGETAEATRLKRTARRRYTRRKNRICYLQEIFSNEMAKVDDSFFHRLEESFLVEEDKKHERHPIFGNIVDEVAYHEKYPTIYHLRKKLVDSTDKADLRLIYLALAHMIKFRGHFLIEGDLNPDNSDVDKLFIQLVQTYNQLFEENPINASGVDAKAILSARLSKSRRLENLIAQLPGEKKNGLFGNLIALSLGLTPNFKSNFDLAEDAKLQLSKDTYDDDLDNLLAQIGDQYADLFLAAKNLSDAILLSDILRVNTEITKAPLSASMIKRYDEHHQDLTLLKALVRQQLPEKYKEIFFDQSKNGYAGYIDGGASQEEFYKFIKPILEKMDGTEELLVKLNREDLLRKQRTFDNGSIPHQIHLGELHAILRRQEDFYPFLKDNREKIEKILTFRIPYYVGPLARGNSRFAWMTRKSEETITPWNFEEVVDKGASAQSFIERMTNFDKNLPNEKVLPKHSLLYEYFTVYNELTKVKYVTEGMRKPAFLSGEQKKAIVDLLFKTNRKVTVKQLKEDYFKKIECFDSVEISGVEDRFNASLGTYHDLLKIIKDKDFLDNEENEDILEDIVLTLTLFEDREMIEERLKTYAHLFDDKVMKQLKRRRYTGWGRLSRKLINGIRDKQSGKTILDFLKSDGFANRNFMQLIHDDSLTFKEDIQKAQVSGQGDSLHEHIANLAGSPAIKKGILQTVKVVDELVKVMGRHKPENIVIEMARENQTTQKGQKNSRERMKRIEEGIKELGSQILKEHPVENTQLQNEKLYLYYLQNGRDMYVDQELDINRLSDYDVDHIVPQSFLKDDSIDNKVLTRSDKARGKSDNVPSEEVVKKMKNYWRQLLNAKLITQRKFDNLTKAERGGLSELDKAGFIKRQLVETRQITKHVAQILDSRMNTKYDENDKLIREVKVITLKSKLVSDFRKDFQFYKVREINNYHHAHDAYLNAVVGTALIKKYPKLESEFVYGDYKVYDVRKMIAKSEQEIGKATAKYFFYSNIMNFFKTEITLANGEIRKRPLIETNGETGEIVWDKGRDFATVRKVLSMPQVNIVKKTEVQTGGFSKESILPKRNSDKLIARKKDWDPKKYGGFDSPTVAYSVLVVAKVEKGKSKKLKSVKELLGITIMERSSFEKNPIDFLEAKGYKEVKKDLIIKLPKYSLFELENGRKRMLASAGELQKGNELALPSKYVNFLYLASHYEKLKGSPEDNEQKQLFVEQHKHYLDEIIEQISEFSKRVILADANLDKVLSAYNKHRDKPIREQAENIIHLFTLTNLGAPAAFKYFDTTIDRKRYTSTKEVLDATLIHQSITGLYETRIDLSQLGGDGGGGSGGGGGTLNIEDEYRLHETSKEPDVSLGSTWLSDFPQAWAETGGMGLAVRQAPLIIPLKATSTPVSIKQYPMSQEARLGIKPHIQRLLDQGILVPCQSPWNTPLLPVKKPGTNDYRPVQDLREVNKRVEDIHPTVPNPYNLLSGLPPSHQWYTVLDLKDAFFCLRLHPTSQPLFAFEWRDPEMGISGQLTWTRLPQGFKNSPTLFNEALHRDLADFRIQHPDLILLQYVDDLLLAATSELDCQQGTRALLQTLGNLGYRASAKKAQICQKQVKYLGYLLKEGQRWLTEARKETVMGQPTPKTPRQLREFLGKAGFCRLFIPGFAEMAAPLYPLTKPGTLFNWGPDQQKAYQEIKQALLTAPALGLPDLTKPFELFVDEKQGYAKGVLTQKLGPWRRPVAYLSKKLDPVAAGWPPCLRMVAAIAVLTKDAGKLTMGQPLVILAPHAVEALVKQPPDRWLSNARMTHYQALLLDTDRVQFGPVVALNPATLLPLPEEGLQHNCLDILAEAHGTRPDLTDQPLPDADHTWYTDGSSLLQEGQRKAGAAVTTETEVIWAKALPAGTSAQRAELIALTQALKMAEGKKLNVYTDSRYAFATAHIHGEIYRRRGWLTSEGKEIKNKDEILALLKALFLPKRLSIIHCPGHQKGHSAEARGNRMADQAARKAAITETPDTSTLLIENSSPSGGSKRTADGSEFEAGKRTADGSEFEKRTADGSEFESPKKKAKVEGSGEGRGSLLTCGDVEENPG

SEQ ID NO: 3671 - protein, 2136 aa, synthetic construct
MPAAKRVKLDGGDKKYSIGLDIGTNSVGWAVITDEYKVPSKKFKVLGNTDRHSIKKNLIGALLFDSGETAEATRLKRTARRRYTRRKNRICYLQEIFSNEMAKVDDSFFHRLEESFLVEEDKKHERHPIFGNIVDEVAYHEKYPTIYHLRKKLVDSTDKADLRLIYLALAHMIKFRGHFLIEGDLNPDNSDVDKLFIQLVQTYNQLFEENPINASGVDAKAILSARLSKSRRLENLIAQLPGEKKNGLFGNLIALSLGLTPNFKSNFDLAEDAKLQLSKDTYDDDLDNLLAQIGDQYADLFLAAKNLSDAILLSDILRVNTEITKAPLSASMIKRYDEHHQDLTLLKALVRQQLPEKYKEIFFDQSKNGYAGYIDGGASQEEFYKFIKPILEKMDGTEELLVKLNREDLLRKQRTFDNGSIPHQIHLGELHAILRRQEDFYPFLKDNREKIEKILTFRIPYYVGPLARGNSRFAWMTRKSEETITPWNFEEVVDKGASAQSFIERMTNFDKNLPNEKVLPKHSLLYEYFTVYNELTKVKYVTEGMRKPAFLSGEQKKAIVDLLFKTNRKVTVKQLKEDYFKKIECFDSVEISGVEDRFNASLGTYHDLLKIIKDKDFLDNEENEDILEDIVLTLTLFEDREMIEERLKTYAHLFDDKVMKQLKRRRYTGWGRLSRKLINGIRDKQSGKTILDFLKSDGFANRNFMQLIHDDSLTFKEDIQKAQVSGQGDSLHEHIANLAGSPAIKKGILQTVKVVDELVKVMGRHKPENIVIEMARENQTTQKGQKNSRERMKRIEEGIKELGSQILKEHPVENTQLQNEKLYLYYLQNGRDMYVDQELDINRLSDYDVDHIVPQSFLKDDSIDNKVLTRSDKARGKSDNVPSEEVVKKMKNYWRQLLNAKLITQRKFDNLTKAERGGLSELDKAGFIKRQLVETRQITKHVAQILDSRMNTKYDENDKLIREVKVITLKSKLVSDFRKDFQFYKVREINNYHHAHDAYLNAVVGTALIKKYPKLESEFVYGDYKVYDVRKMIAKSEQEIGKATAKYFFYSNIMNFFKTEITLANGEIRKRPLIETNGETGEIVWDKGRDFATVRKVLSMPQVNIVKKTEVQTGGFSKESILPKRNSDKLIARKKDWDPKKYGGFDSPTVAYSVLVVAKVEKGKSKKLKSVKELLGITIMERSSFEKNPIDFLEAKGYKEVKKDLIIKLPKYSLFELENGRKRMLASAGELQKGNELALPSKYVNFLYLASHYEKLKGSPEDNEQKQLFVEQHKHYLDEIIEQISEFSKRVILADANLDKVLSAYNKHRDKPIREQAENIIHLFTLTNLGAPAAFKYFDTTIDRKRYTSTKEVLDATLIHQSITGLYETRIDLSQLGGDGGGGSGGGEAAAKGGTLNIEDEYRLHETSKEPDVSLGSTWLSDFPQAWAETGGMGLAVRQAPLIIPLKATSTPVSIKQYPMSQEARLGIKPHIQRLLDQGILVPCQSPWNTPLLPVKKPGTNDYRPVQDLREVNKRVEDIHPTVPNPYNLLSGLPPSHQWYTVLDLKDAFFCLRLHPTSQPLFAFEWRDPEMGISGQLTWTRLPQGFKNSPTLFNEALHRDLADFRIQHPDLILLQYVDDLLLAATSELDCQQGTRALLQTLGNLGYRASAKKAQICQKQVKYLGYLLKEGQRWLTEARKETVMGQPTPKTPRQLREFLGKAGFCRLFIPGFAEMAAPLYPLTKPGTLFNWGPDQQKAYQEIKQALLTAPALGLPDLTKPFELFVDEKQGYAKGVLTQKLGPWRRPVAYLSKKLDPVAAGWPPCLRMVAAIAVLTKDAGKLTMGQPLVILAPHAVEALVKQPPDRWLSNARMTHYQALLLDTDRVQFGPVVALNPATLLPLPEEGLQHNCLDILAEAHGTRPDLTDQPLPDADHTWYTDGSSLLQEGQRKAGAAVTTETEVIWAKALPAGTSAQRAELIALTQALKMAEGKKLNVYTDSRYAFATAHIHGEIYRRRGWLTSEGKEIKNKDEILALLKALFLPKRLSIIHCPGHQKGHSAEARGNRMADQAARKAAITETPDTSTLLIENSSPSGGSKRTADGSEFEAGKRTADGSEFEKRTADGSEFESPKKKAKVEGSGEGRGSLLTCGDVEENPG

SEQ ID NO: 3672 - protein, 2136 aa, synthetic construct
MPAAKRVKLDGGDKKYSIGLDIGTNSVGWAVITDEYKVPSKKFKVLGNTDRHSIKKNLIGALLFDSGETAEATRLKRTARRRYTRRKNRICYLQEIFSNEMAKVDDSFFHRLEESFLVEEDKKHERHPIFGNIVDEVAYHEKYPTIYHLRKKLVDSTDKADLRLIYLALAHMIKFRGHFLIEGDLNPDNSDVDKLFIQLVQTYNQLFEENPINASGVDAKAILSARLSKSRRLENLIAQLPGEKKNGLFGNLIALSLGLTPNFKSNFDLAEDAKLQLSKDTYDDDLDNLLAQIGDQYADLFLAAKNLSDAILLSDILRVNTEITKAPLSASMIKRYDEHHQDLTLLKALVRQQLPEKYKEIFFDQSKNGYAGYIDGGASQEEFYKFIKPILEKMDGTEELLVKLNREDLLRKQRTFDNGSIPHQIHLGELHAILRRQEDFYPFLKDNREKIEKILTFRIPYYVGPLARGNSRFAWMTRKSEETITPWNFEEVVDKGASAQSFIERMTNFDKNLPNEKVLPKHSLLYEYFTVYNELTKVKYVTEGMRKPAFLSGEQKKAIVDLLFKTNRKVTVKQLKEDYFKKIECFDSVEISGVEDRFNASLGTYHDLLKIIKDKDFLDNEENEDILEDIVLTLTLFEDREMIEERLKTYAHLFDDKVMKQLKRRRYTGWGRLSRKLINGIRDKQSGKTILDFLKSDGFANRNFMQLIHDDSLTFKEDIQKAQVSGQGDSLHEHIANLAGSPAIKKGILQTVKVVDELVKVMGRHKPENIVIEMARENQTTQKGQKNSRERMKRIEEGIKELGSQILKEHPVENTQLQNEKLYLYYLQNGRDMYVDQELDINRLSDYDVDHIVPQSFLKDDSIDNKVLTRSDKARGKSDNVPSEEVVKKMKNYWRQLLNAKLITQRKFDNLTKAERGGLSELDKAGFIKRQLVETRQITKHVAQILDSRMNTKYDENDKLIREVKVITLKSKLVSDFRKDFQFYKVREINNYHHAHDAYLNAVVGTALIKKYPKLESEFVYGDYKVYDVRKMIAKSEQEIGKATAKYFFYSNIMNFFKTEITLANGEIRKRPLIETNGETGEIVWDKGRDFATVRKVLSMPQVNIVKKTEVQTGGFSKESILPKRNSDKLIARKKDWDPKKYGGFDSPTVAYSVLVVAKVEKGKSKKLKSVKELLGITIMERSSFEKNPIDFLEAKGYKEVKKDLIIKLPKYSLFELENGRKRMLASAGELQKGNELALPSKYVNFLYLASHYEKLKGSPEDNEQKQLFVEQHKHYLDEIIEQISEFSKRVILADANLDKVLSAYNKHRDKPIREQAENIIHLFTLTNLGAPAAFKYFDTTIDRKRYTSTKEVLDATLIHQSITGLYETRIDLSQLGGDGGEAAAKGGSGGGGGTLNIEDEYRLHETSKEPDVSLGSTWLSDFPQAWAETGGMGLAVRQAPLIIPLKATSTPVSIKQYPMSQEARLGIKPHIQRLLDQGILVPCQSPWNTPLLPVKKPGTNDYRPVQDLREVNKRVEDIHPTVPNPYNLLSGLPPSHQWYTVLDLKDAFFCLRLHPTSQPLFAFEWRDPEMGISGQLTWTRLPQGFKNSPTLFNEALHRDLADFRIQHPDLILLQYVDDLLLAATSELDCQQGTRALLQTLGNLGYRASAKKAQICQKQVKYLGYLLKEGQRWLTEARKETVMGQPTPKTPRQLREFLGKAGFCRLFIPGFAEMAAPLYPLTKPGTLFNWGPDQQKAYQEIKQALLTAPALGLPDLTKPFELFVDEKQGYAKGVLTQKLGPWRRPVAYLSKKLDPVAAGWPPCLRMVAAIAVLTKDAGKLTMGQPLVILAPHAVEALVKQPPDRWLSNARMTHYQALLLDTDRVQFGPVVALNPATLLPLPEEGLQHNCLDILAEAHGTRPDLTDQPLPDADHTWYTDGSSLLQEGQRKAGAAVTTETEVIWAKALPAGTSAQRAELIALTQALKMAEGKKLNVYTDSRYAFATAHIHGEIYRRRGWLTSEGKEIKNKDEILALLKALFLPKRLSIIHCPGHQKGHSAEARGNRMADQAARKAAITETPDTSTLLIENSSPSGGSKRTADGSEFEAGKRTADGSEFEKRTADGSEFESPKKKAKVEGSGEGRGSLLTCGDVEENPG

SEQ ID NO: 3673 - protein, 2134 aa, synthetic construct
MPAAKRVKLDGGDKKYSIGLDIGTNSVGWAVITDEYKVPSKKFKVLGNTDRHSIKKNLIGALLFDSGETAEATRLKRTARRRYTRRKNRICYLQEIFSNEMAKVDDSFFHRLEESFLVEEDKKHERHPIFGNIVDEVAYHEKYPTIYHLRKKLVDSTDKADLRLIYLALAHMIKFRGHFLIEGDLNPDNSDVDKLFIQLVQTYNQLFEENPINASGVDAKAILSARLSKSRRLENLIAQLPGEKKNGLFGNLIALSLGLTPNFKSNFDLAEDAKLQLSKDTYDDDLDNLLAQIGDQYADLFLAAKNLSDAILLSDILRVNTEITKAPLSASMIKRYDEHHQDLTLLKALVRQQLPEKYKEIFFDQSKNGYAGYIDGGASQEEFYKFIKPILEKMDGTEELLVKLNREDLLRKQRTFDNGSIPHQIHLGELHAILRRQEDFYPFLKDNREKIEKILTFRIPYYVGPLARGNSRFAWMTRKSEETITPWNFEEVVDKGASAQSFIERMTNFDKNLPNEKVLPKHSLLYEYFTVYNELTKVKYVTEGMRKPAFLSGEQKKAIVDLLFKTNRKVTVKQLKEDYFKKIECFDSVEISGVEDRFNASLGTYHDLLKIIKDKDFLDNEENEDILEDIVLTLTLFEDREMIEERLKTYAHLFDDKVMKQLKRRRYTGWGRLSRKLINGIRDKQSGKTILDFLKSDGFANRNFMQLIHDDSLTFKEDIQKAQVSGQGDSLHEHIANLAGSPAIKKGILQTVKVVDELVKVMGRHKPENIVIEMARENQTTQKGQKNSRERMKRIEEGIKELGSQILKEHPVENTQLQNEKLYLYYLQNGRDMYVDQELDINRLSDYDVDHIVPQSFLKDDSIDNKVLTRSDKARGKSDNVPSEEVVKKMKNYWRQLLNAKLITQRKFDNLTKAERGGLSELDKAGFIKRQLVETRQITKHVAQILDSRMNTKYDENDKLIREVKVITLKSKLVSDFRKDFQFYKVREINNYHHAHDAYLNAVVGTALIKKYPKLESEFVYGDYKVYDVRKMIAKSEQEIGKATAKYFFYSNIMNFFKTEITLANGEIRKRPLIETNGETGEIVWDKGRDFATVRKVLSMPQVNIVKKTEVQTGGFSKESILPKRNSDKLIARKKDWDPKKYGGFDSPTVAYSVLVVAKVEKGKSKKLKSVKELLGITIMERSSFEKNPIDFLEAKGYKEVKKDLIIKLPKYSLFELENGRKRMLASAGELQKGNELALPSKYVNFLYLASHYEKLKGSPEDNEQKQLFVEQHKHYLDEIIEQISEFSKRVILADANLDKVLSAYNKHRDKPIREQAENIIHLFTLTNLGAPAAFKYFDTTIDRKRYTSTKEVLDATLIHQSITGLYETRIDLSQLGGDGGGGSGGGPAPGGTLNIEDEYRLHETSKEPDVSLGSTWLSDFPQAWAETGGMGLAVRQAPLIIPLKATSTPVSIKQYPMSQEARLGIKPHIQRLLDQGILVPCQSPWNTPLLPVKKPGTNDYRPVQDLREVNKRVEDIHPTVPNPYNLLSGLPPSHQWYTVLDLKDAFFCLRLHPTSQPLFAFEWRDPEMGISGQLTWTRLPQGFKNSPTLFNEALHRDLADFRIQHPDLILLQYVDDLLLAATSELDCQQGTRALLQTLGNLGYRASAKKAQICQKQVKYLGYLLKEGQRWLTEARKETVMGQPTPKTPRQLREFLGKAGFCRLFIPGFAEMAAPLYPLTKPGTLFNWGPDQQKAYQEIKQALLTAPALGLPDLTKPFELFVDEKQGYAKGVLTQKLGPWRRPVAYLSKKLDPVAAGWPPCLRMVAAIAVLTKDAGKLTMGQPLVILAPHAVEALVKQPPDRWLSNARMTHYQALLLDTDRVQFGPVVALNPATLLPLPEEGLQHNCLDILAEAHGTRPDLTDQPLPDADHTWYTDGSSLLQEGQRKAGAAVTTETEVIWAKALPAGTSAQRAELIALTQALKMAEGKKLNVYTDSRYAFATAHIHGEIYRRRGWLTSEGKEIKNKDEILALLKALFLPKRLSIIHCPGHQKGHSAEARGNRMADQAARKAAITETPDTSTLLIENSSPSGGSKRTADGSEFEAGKRTADGSEFEKRTADGSEFESPKKKAKVEGSGEGRGSLLTCGDVEENPG

SEQ ID NO: 3674 - protein, 2136 aa, synthetic construct
MPAAKRVKLDGGDKKYSIGLDIGTNSVGWAVITDEYKVPSKKFKVLGNTDRHSIKKNLIGALLFDSGETAEATRLKRTARRRYTRRKNRICYLQEIFSNEMAKVDDSFFHRLEESFLVEEDKKHERHPIFGNIVDEVAYHEKYPTIYHLRKKLVDSTDKADLRLIYLALAHMIKFRGHFLIEGDLNPDNSDVDKLFIQLVQTYNQLFEENPINASGVDAKAILSARLSKSRRLENLIAQLPGEKKNGLFGNLIALSLGLTPNFKSNFDLAEDAKLQLSKDTYDDDLDNLLAQIGDQYADLFLAAKNLSDAILLSDILRVNTEITKAPLSASMIKRYDEHHQDLTLLKALVRQQLPEKYKEIFFDQSKNGYAGYIDGGASQEEFYKFIKPILEKMDGTEELLVKLNREDLLRKQRTFDNGSIPHQIHLGELHAILRRQEDFYPFLKDNREKIEKILTFRIPYYVGPLARGNSRFAWMTRKSEETITPWNFEEVVDKGASAQSFIERMTNFDKNLPNEKVLPKHSLLYEYFTVYNELTKVKYVTEGMRKPAFLSGEQKKAIVDLLFKTNRKVTVKQLKEDYFKKIECFDSVEISGVEDRFNASLGTYHDLLKIIKDKDFLDNEENEDILEDIVLTLTLFEDREMIEERLKTYAHLFDDKVMKQLKRRRYTGWGRLSRKLINGIRDKQSGKTILDFLKSDGFANRNFMQLIHDDSLTFKEDIQKAQVSGQGDSLHEHIANLAGSPAIKKGILQTVKVVDELVKVMGRHKPENIVIEMARENQTTQKGQKNSRERMKRIEEGIKELGSQILKEHPVENTQLQNEKLYLYYLQNGRDMYVDQELDINRLSDYDVDHIVPQSFLKDDSIDNKVLTRSDKARGKSDNVPSEEVVKKMKNYWRQLLNAKLITQRKFDNLTKAERGGLSELDKAGFIKRQLVETRQITKHVAQILDSRMNTKYDENDKLIREVKVITLKSKLVSDFRKDFQFYKVREINNYHHAHDAYLNAVVGTALIKKYPKLESEFVYGDYKVYDVRKMIAKSEQEIGKATAKYFFYSNIMNFFKTEITLANGEIRKRPLIETNGETGEIVWDKGRDFATVRKVLSMPQVNIVKKTEVQTGGFSKESILPKRNSDKLIARKKDWDPKKYGGFDSPTVAYSVLVVAKVEKGKSKKLKSVKELLGITIMERSSFEKNPIDFLEAKGYKEVKKDLIIKLPKYSLFELENGRKRMLASAGELQKGNELALPSKYVNFLYLASHYEKLKGSPEDNEQKQLFVEQHKHYLDEIIEQISEFSKRVILADANLDKVLSAYNKHRDKPIREQAENIIHLFTLTNLGAPAAFKYFDTTIDRKRYTSTKEVLDATLIHQSITGLYETRIDLSQLGGDGGEAAAKGGGGSSGGTLNIEDEYRLHETSKEPDVSLGSTWLSDFPQAWAETGGMGLAVRQAPLIIPLKATSTPVSIKQYPMSQEARLGIKPHIQRLLDQGILVPCQSPWNTPLLPVKKPGTNDYRPVQDLREVNKRVEDIHPTVPNPYNLLSGLPPSHQWYTVLDLKDAFFCLRLHPTSQPLFAFEWRDPEMGISGQLTWTRLPQGFKNSPTLFNEALHRDLADFRIQHPDLILLQYVDDLLLAATSELDCQQGTRALLQTLGNLGYRASAKKAQICQKQVKYLGYLLKEGQRWLTEARKETVMGQPTPKTPRQLREFLGKAGFCRLFIPGFAEMAAPLYPLTKPGTLFNWGPDQQKAYQEIKQALLTAPALGLPDLTKPFELFVDEKQGYAKGVLTQKLGPWRRPVAYLSKKLDPVAAGWPPCLRMVAAIAVLTKDAGKLTMGQPLVILAPHAVEALVKQPPDRWLSNARMTHYQALLLDTDRVQFGPVVALNPATLLPLPEEGLQHNCLDILAEAHGTRPDLTDQPLPDADHTWYTDGSSLLQEGQRKAGAAVTTETEVIWAKALPAGTSAQRAELIALTQALKMAEGKKLNVYTDSRYAFATAHIHGEIYRRRGWLTSEGKEIKNKDEILALLKALFLPKRLSIIHCPGHQKGHSAEARGNRMADQAARKAAITETPDTSTLLIENSSPSGGSKRTADGSEFEAGKRTADGSEFEKRTADGSEFESPKKKAKVEGSGEGRGSLLTCGDVEENPG

SEQ ID NO: 3675 - protein, 2171 aa, synthetic construct
MPAAKRVKLDGGDKKYSIGLDIGTNSVGWAVITDEYKVPSKKFKVLGNTDRHSIKKNLIGALLFDSGETAEATRLKRTARRRYTRRKNRICYLQEIFSNEMAKVDDSFFHRLEESFLVEEDKKHERHPIFGNIVDEVAYHEKYPTIYHLRKKLVDSTDKADLRLIYLALAHMIKFRGHFLIEGDLNPDNSDVDKLFIQLVQTYNQLFEENPINASGVDAKAILSARLSKSRRLENLIAQLPGEKKNGLFGNLIALSLGLTPNFKSNFDLAEDAKLQLSKDTYDDDLDNLLAQIGDQYADLFLAAKNLSDAILLSDILRVNTEITKAPLSASMIKRYDEHHQDLTLLKALVRQQLPEKYKEIFFDQSKNGYAGYIDGGASQEEFYKFIKPILEKMDGTEELLVKLNREDLLRKQRTFDNGSIPHQIHLGELHAILRRQEDFYPFLKDNREKIEKILTFRIPYYVGPLARGNSRFAWMTRKSEETITPWNFEEVVDKGASAQSFIERMTNFDKNLPNEKVLPKHSLLYEYFTVYNELTKVKYVTEGMRKPAFLSGEQKKAIVDLLFKTNRKVTVKQLKEDYFKKIECFDSVEISGVEDRFNASLGTYHDLLKIIKDKDFLDNEENEDILEDIVLTLTLFEDREMIEERLKTYAHLFDDKVMKQLKRRRYTGWGRLSRKLINGIRDKQSGKTILDFLKSDGFANRNFMQLIHDDSLTFKEDIQKAQVSGQGDSLHEHIANLAGSPAIKKGILQTVKVVDELVKVMGRHKPENIVIEMARENQTTQKGQKNSRERMKRIEEGIKELGSQILKEHPVENTQLQNEKLYLYYLQNGRDMYVDQELDINRLSDYDVDHIVPQSFLKDDSIDNKVLTRSDKARGKSDNVPSEEVVKKMKNYWRQLLNAKLITQRKFDNLTKAERGGLSELDKAGFIKRQLVETRQITKHVAQILDSRMNTKYDENDKLIREVKVITLKSKLVSDFRKDFQFYKVREINNYHHAHDAYLNAVVGTALIKKYPKLESEFVYGDYKVYDVRKMIAKSEQEIGKATAKYFFYSNIMNFFKTEITLANGEIRKRPLIETNGETGEIVWDKGRDFATVRKVLSMPQVNIVKKTEVQTGGFSKESILPKRNSDKLIARKKDWDPKKYGGFDSPTVAYSVLVVAKVEKGKSKKLKSVKELLGITIMERSSFEKNPIDFLEAKGYKEVKKDLIIKLPKYSLFELENGRKRMLASAGELQKGNELALPSKYVNFLYLASHYEKLKGSPEDNEQKQLFVEQHKHYLDEIIEQISEFSKRVILADANLDKVLSAYNKHRDKPIREQAENIIHLFTLTNLGAPAAFKYFDTTIDRKRYTSTKEVLDATLIHQSITGLYETRIDLSQLGGDGGAEAAAKEAAAKEAAAKEAAAKALEAEAAAKEAAAKEAAAKEAAAKAGGTLNIEDEYRLHETSKEPDVSLGSTWLSDFPQAWAETGGMGLAVRQAPLIIPLKATSTPVSIKQYPMSQEARLGIKPHIQRLLDQGILVPCQSPWNTPLLPVKKPGTNDYRPVQDLREVNKRVEDIHPTVPNPYNLLSGLPPSHQWYTVLDLKDAFFCLRLHPTSQPLFAFEWRDPEMGISGQLTWTRLPQGFKNSPTLFNEALHRDLADFRIQHPDLILLQYVDDLLLAATSELDCQQGTRALLQTLGNLGYRASAKKAQICQKQVKYLGYLLKEGQRWLTEARKETVMGQPTPKTPRQLREFLGKAGFCRLFIPGFAEMAAPLYPLTKPGTLFNWGPDQQKAYQEIKQALLTAPALGLPDLTKPFELFVDEKQGYAKGVLTQKLGPWRRPVAYLSKKLDPVAAGWPPCLRMVAAIAVLTKDAGKLTMGQPLVILAPHAVEALVKQPPDRWLSNARMTHYQALLLDTDRVQFGPVVALNPATLLPLPEEGLQHNCLDILAEAHGTRPDLTDQPLPDADHTWYTDGSSLLQEGQRKAGAAVTTETEVIWAKALPAGTSAQRAELIALTQALKMAEGKKLNVYTDSRYAFATAHIHGEIYRRRGWLTSEGKEIKNKDEILALLKALFLPKRLSIIHCPGHQKGHSAEARGNRMADQAARKAAITETPDTSTLLIENSSPSGGSKRTADGSEFEAGKRTADGSEFEKRTADGSEFESPKKKAKVEGSGEGRGSLLTCGDVEENPG

SEQ ID NO: 3676 - protein, 2088 aa, synthetic construct; identical to SEQ ID NO: 3562

SEQ ID NO: 3677 - protein, 2111 aa, synthetic construct
MKRTADGSEFESPKKKRKVDKKYSIGLDIGTNSVGWAVITDEYKVPSKKFKVLGNTDRHSIKKNLIGALLFDSGETAEATRLKRTARRRYTRRKNRICYLQEIFSNEMAKVDDSFFHRLEESFLVEEDKKHERHPIFGNIVDEVAYHEKYPTIYHLRKKLVDSTDKADLRLIYLALAHMIKFRGHFLIEGDLNPDNSDVDKLFIQLVQTYNQLFEENPINASGVDAKAILSARLSKSRRLENLIAQLPGEKKNGLFGNLIALSLGLTPNFKSNFDLAEDAKLQLSKDTYDDDLDNLLAQIGDQYADLFLAAKNLSDAILLSDILRVNTEITKAPLSASMIKRYDEHHQDLTLLKALVRQQLPEKYKEIFFDQSKNGYAGYIDGGASQEEFYKFIKPILEKMDGTEELLVKLNREDLLRKQRTFDNGSIPHQIHLGELHAILRRQEDFYPFLKDNREKIEKILTFRIPYYVGPLARGNSRFAWMTRKSEETITPWNFEEVVDKGASAQSFIERMTNFDKNLPNEKVLPKHSLLYEYFTVYNELTKVKYVTEGMRKPAFLSGEQKKAIVDLLFKTNRKVTVKQLKEDYFKKIECFDSVEISGVEDRFNASLGTYHDLLKIIKDKDFLDNEENEDILEDIVLTLTLFEDREMIEERLKTYAHLFDDKVMKQLKRRRYTGWGRLSRKLINGIRDKQSGKTILDFLKSDGFANRNFMQLIHDDSLTFKEDIQKAQVSGQGDSLHEHIANLAGSPAIKKGILQTVKVVDELVKVMGRHKPENIVIEMARENQTTQKGQKNSRERMKRIEEGIKELGSQILKEHPVENTQLQNEKLYLYYLQNGRDMYVDQELDINRLSDYDVDHIVPQSFLKDDSIDNKVLTRSDKARGKSDNVPSEEVVKKMKNYWRQLLNAKLITQRKFDNLTKAERGGLSELDKAGFIKRQLVETRQITKHVAQILDSRMNTKYDENDKLIREVKVITLKSKLVSDFRKDFQFYKVREINNYHHAHDAYLNAVVGTALIKKYPKLESEFVYGDYKVYDVRKMIAKSEQEIGKATAKYFFYSNIMNFFKTEITLANGEIRKRPLIETNGETGEIVWDKGRDFATVRKVLSMPQVNIVKKTEVQTGGFSKESILPKRNSDKLIARKKDWDPKKYGGFDSPTVAYSVLVVAKVEKGKSKKLKSVKELLGITIMERSSFEKNPIDFLEAKGYKEVKKDLIIKLPKYSLFELENGRKRMLASAGELQKGNELALPSKYVNFLYLASHYEKLKGSPEDNEQKQLFVEQHKHYLDEIIEQISEFSKRVILADANLDKVLSAYNKHRDKPIREQAENIIHLFTLTNLGAPAAFKYFDTTIDRKRYTSTKEVLDATLIHQSITGLYETRIDLSQLGGDSGGSSGGSSGSETPGTSESATPESSGGSSGGSSLGIEDEYRLHETSTEPDVSLGSTWLSDFPQAWAETGGMGLAVRQAPLIIPLKATSTPVSIQQYPMSHEARLGIKPHIQRLLDQGILVPCQSPWNTPLLPVKKPGTNDYRPVQDLREVNKRVEDIHPTVPNPYNLLSGLPPSHQWYTVLDLKDAFFCLRLHPTSQPLFAFEWRDPGMGISGQLTWTRLPQGFKNSPTLFNEALHRDLADFRIQHPDLILLQYVDDILLAATSELDCQQGTRALLQTLGDLGYRASAKKAQICQKQVKYLGYLLREGQRWLTEARKETVMGQPVPKTPRQLREFLGKAGFCRLFIPGFAEMAAPLYPLTKPGTLFSWGPDQQKAYQEIKQALLTAPALGLPDLTKPFELFVDEKQGYAKGVLTQKLGPWRRPVAYLSKKLDPVAAGWPPCLRMVAAIAVLTKDAGKLTMGQPLVILAPHAVEALVKQPPDRWLSNARMTHYQAMLLDTDRVQFGPVVALNPATLLPLPEEGAPHDCLEILAETHGTRPDLTDQPIPDADHTWYTDGSSFLQEGQRKAGAAVTTETEVIWAGALPAGTSAQRAELIALTQALKMAEGKRLNVYTDSRYAFATAHIHGEIYRRRGWLTSEGREIKNKSEILALLKALFLPKRLSIIHCLGHQKGDSAEARGNRLADQAAREAAIKTPPDTSTLLISGGSKRTADGSEFEPKKKRKV

SEQ ID NO: 3678 - protein, 2116 aa, synthetic construct
MPAAKRVKLDGGDKKYSIGLDIGTNSVGWAVITDEYKVPSKKFKVLGNTDRHSIKKNLIGALLFDSGETAEATRLKRTARRRYTRRKNRICYLQEIFSNEMAKVDDSFFHRLEESFLVEEDKKHERHPIFGNIVDEVAYHEKYPTIYHLRKKLVDSTDKADLRLIYLALAHMIKFRGHFLIEGDLNPDNSDVDKLFIQLVQTYNQLFEENPINASGVDAKAILSARLSKSRRLENLIAQLPGEKKNGLFGNLIALSLGLTPNFKSNFDLAEDAKLQLSKDTYDDDLDNLLAQIGDQYADLFLAAKNLSDAILLSDILRVNTEITKAPLSASMIKRYDEHHQDLTLLKALVRQQLPEKYKEIFFDQSKNGYAGYIDGGASQEEFYKFIKPILEKMDGTEELLVKLNREDLLRKQRTFDNGSIPHQIHLGELHAILRRQEDFYPFLKDNREKIEKILTFRIPYYVGPLARGNSRFAWMTRKSEETITPWNFEEVVDKGASAQSFIERMTNFDKNLPNEKVLPKHSLLYEYFTVYNELTKVKYVTEGMRKPAFLSGEQKKAIVDLLFKTNRKVTVKQLKEDYFKKIECFDSVEISGVEDRFNASLGTYHDLLKIIKDKDFLDNEENEDILEDIVLTLTLFEDREMIEERLKTYAHLFDDKVMKQLKRRRYTGWGRLSRKLINGIRDKQSGKTILDFLKSDGFANRNFMQLIHDDSLTFKEDIQKAQVSGQGDSLHEHIANLAGSPAIKKGILQTVKVVDELVKVMGRHKPENIVIEMARENQTTQKGQKNSRERMKRIEEGIKELGSQILKEHPVENTQLQNEKLYLYYLQNGRDMYVDQELDINRLSDYDVDHIVPQSFLKDDSIDNKVLTRSDKARGKSDNVPSEEVVKKMKNYWRQLLNAKLITQRKFDNLTKAERGGLSELDKAGFIKRQLVETRQITKHVAQILDSRMNTKYDENDKLIREVKVITLKSKLVSDFRKDFQFYKVREINNYHHAHDAYLNAVVGTALIKKYPKLESEFVYGDYKVYDVRKMIAKSEQEIGKATAKYFFYSNIMNFFKTEITLANGEIRKRPLIETNGETGEIVWDKGRDFATVRKVLSMPQVNIVKKTEVQTGGFSKESILPKRNSDKLIARKKDWDPKKYGGFDSPTVAYSVLVVAKVEKGKSKKLKSVKELLGITIMERSSFEKNPIDFLEAKGYKEVKKDLIIKLPKYSLFELENGRKRMLASAGELQKGNELALPSKYVNFLYLASHYEKLKGSPEDNEQKQLFVEQHKHYLDEIIEQISEFSKRVILADANLDKVLSAYNKHRDKPIREQAENIIHLFTLTNLGAPAAFKYFDTTIDRKRYTSTKEVLDATLIHQSITGLYETRIDLSQLGGDSGGSSGGSSGSETPGTSESATPESSGGSSGGSSLGIEDEYRLHETSTEPDVSLGSTWLSDFPQAWAETGGMGLAVRQAPLIIPLKATSTPVSIQQYPMSHEARLGIKPHIQRLLDQGILVPCQSPWNTPLLPVKKPGTNDYRPVQDLREVNKRVEDIHPTVPNPYNLLSGLPPSHQWYTVLDLKDAFFCLRLHPTSQPLFAFEWRDPGMGISGQLTWTRLPQGFKNSPTLFNEALHRDLADFRIQHPDLILLQYVDDILLAATSELDCQQGTRALLQTLGDLGYRASAKKAQICQKQVKYLGYLLREGQRWLTEARKETVMGQPVPKTPRQLREFLGKAGFCRLFIPGFAEMAAPLYPLTKPGTLFSWGPDQQKAYQEIKQALLTAPALGLPDLTKPFELFVDEKQGYAKGVLTQKLGPWRRPVAYLSKKLDPVAAGWPPCLRMVAAIAVLTKDAGKLTMGQPLVILAPHAVEALVKQPPDRWLSNARMTHYQAMLLDTDRVQFGPVVALNPATLLPLPEEGAPHDCLEILAETHGTRPDLTDQPIPDADHTWYTDGSSFLQEGQRKAGAAVTTETEVIWAGALPAGTSAQRAELIALTQALKMAEGKRLNVYTDSRYAFATAHIHGEIYRRRGWLTSEGREIKNKSEILALLKALFLPKRLSIIHCLGHQKGDSAEARGNRLADQAAREAAIKTPPDTSTLLISGGSKRTADGSEFEKRTADGSEFESPKKKAKVE

SEQ ID NO: 3679 - protein, 2138 aa, synthetic construct
MPAAKRVKLDGGDKKYSIGLDIGTNSVGWAVITDEYKVPSKKFKVLGNTDRHSIKKNLIGALLFDSGETAEATRLKRTARRRYTRRKNRICYLQEIFSNEMAKVDDSFFHRLEESFLVEEDKKHERHPIFGNIVDEVAYHEKYPTIYHLRKKLVDSTDKADLRLIYLALAHMIKFRGHFLIEGDLNPDNSDVDKLFIQLVQTYNQLFEENPINASGVDAKAILSARLSKSRRLENLIAQLPGEKKNGLFGNLIALSLGLTPNFKSNFDLAEDAKLQLSKDTYDDDLDNLLAQIGDQYADLFLAAKNLSDAILLSDILRVNTEITKAPLSASMIKRYDEHHQDLTLLKALVRQQLPEKYKEIFFDQSKNGYAGYIDGGASQEEFYKFIKPILEKMDGTEELLVKLNREDLLRKQRTFDNGSIPHQIHLGELHAILRRQEDFYPFLKDNREKIEKILTFRIPYYVGPLARGNSRFAWMTRKSEETITPWNFEEVVDKGASAQSFIERMTNFDKNLPNEKVLPKHSLLYEYFTVYNELTKVKYVTEGMRKPAFLSGEQKKAIVDLLFKTNRKVTVKQLKEDYFKKIECFDSVEISGVEDRFNASLGTYHDLLKIIKDKDFLDNEENEDILEDIVLTLTLFEDREMIEERLKTYAHLFDDKVMKQLKRRRYTGWGRLSRKLINGIRDKQSGKTILDFLKSDGFANRNFMQLIHDDSLTFKEDIQKAQVSGQGDSLHEHIANLAGSPAIKKGILQTVKVVDELVKVMGRHKPENIVIEMARENQTTQKGQKNSRERMKRIEEGIKELGSQILKEHPVENTQLQNEKLYLYYLQNGRDMYVDQELDINRLSDYDVDHIVPQSFLKDDSIDNKVLTRSDKARGKSDNVPSEEVVKKMKNYWRQLLNAKLITQRKFDNLTKAERGGLSELDKAGFIKRQLVETRQITKHVAQILDSRMNTKYDENDKLIREVKVITLKSKLVSDFRKDFQFYKVREINNYHHAHDAYLNAVVGTALIKKYPKLESEFVYGDYKVYDVRKMIAKSEQEIGKATAKYFFYSNIMNFFKTEITLANGEIRKRPLIETNGETGEIVWDKGRDFATVRKVLSMPQVNIVKKTEVQTGGFSKESILPKRNSDKLIARKKDWDPKKYGGFDSPTVAYSVLVVAKVEKGKSKKLKSVKELLGITIMERSSFEKNPIDFLEAKGYKEVKKDLIIKLPKYSLFELENGRKRMLASAGELQKGNELALPSKYVNFLYLASHYEKLKGSPEDNEQKQLFVEQHKHYLDEIIEQISEFSKRVILADANLDKVLSAYNKHRDKPIREQAENIIHLFTLTNLGAPAAFKYFDTTIDRKRYTSTKEVLDATLIHQSITGLYETRIDLSQLGGDGGSGGSSGGSSGSETPGTSESATPESSGGSSGGSSGGLGIEDEYRLHETSTEPDVSLGSTWLSDFPQAWAETGGMGLAVRQAPLIIPLKATSTPVSIQQYPMSHEARLGIKPHIQRLLDQGILVPCQSPWNTPLLPVKKPGTNDYRPVQDLREVNKRVEDIHPTVPNPYNLLSGLPPSHQWYTVLDLKDAFFCLRLHPTSQPLFAFEWRDPGMGISGQLTWTRLPQGFKNSPTLFNEALHRDLADFRIQHPDLILLQYVDDILLAATSELDCQQGTRALLQTLGDLGYRASAKKAQICQKQVKYLGYLLREGQRWLTEARKETVMGQPVPKTPRQLREFLGKAGFCRLFIPGFAEMAAPLYPLTKPGTLFSWGPDQQKAYQEIKQALLTAPALGLPDLTKPFELFVDEKQGYAKGVLTQKLGPWRRPVAYLSKKLDPVAAGWPPCLRMVAAIAVLTKDAGKLTMGQPLVILAPHAVEALVKQPPDRWLSNARMTHYQAMLLDTDRVQFGPVVALNPATLLPLPEEGAPHDCLEILAETHGTRPDLTDQPIPDADHTWYTDGSSFLQEGQRKAGAAVTTETEVIWAGALPAGTSAQRAELIALTQALKMAEGKRLNVYTDSRYAFATAHIHGEIYRRRGWLTSEGREIKNKSEILALLKALFLPKRLSIIHCLGHQKGDSAEARGNRLADQAAREAAIKTPPDTSTLLIAGKRTADGSEFEKRTADGSEFESPKKKAKVEGSGEGRGSLLTCGDVEENPG

SEQ ID NO: 3680 - protein, 2114 aa, synthetic construct
MPAAKRVKLDGGDKKYSIGLDIGTNSVGWAVITDEYKVPSKKFKVLGNTDRHSIKKNLIGALLFDSGETAEATRLKRTARRRYTRRKNRICYLQEIFSNEMAKVDDSFFHRLEESFLVEEDKKHERHPIFGNIVDEVAYHEKYPTIYHLRKKLVDSTDKADLRLIYLALAHMIKFRGHFLIEGDLNPDNSDVDKLFIQLVQTYNQLFEENPINASGVDAKAILSARLSKSRRLENLIAQLPGEKKNGLFGNLIALSLGLTPNFKSNFDLAEDAKLQLSKDTYDDDLDNLLAQIGDQYADLFLAAKNLSDAILLSDILRVNTEITKAPLSASMIKRYDEHHQDLTLLKALVRQQLPEKYKEIFFDQSKNGYAGYIDGGASQEEFYKFIKPILEKMDGTEELLVKLNREDLLRKQRTFDNGSIPHQIHLGELHAILRRQEDFYPFLKDNREKIEKILTFRIPYYVGPLARGNSRFAWMTRKSEETITPWNFEEVVDKGASAQSFIERMTNFDKNLPNEKVLPKHSLLYEYFTVYNELTKVKYVTEGMRKPAFLSGEQKKAIVDLLFKTNRKVTVKQLKEDYFKKIECFDSVEISGVEDRFNASLGTYHDLLKIIKDKDFLDNEENEDILEDIVLTLTLFEDREMIEERLKTYAHLFDDKVMKQLKRRRYTGWGRLSRKLINGIRDKQSGKTILDFLKSDGFANRNFMQLIHDDSLTFKEDIQKAQVSGQGDSLHEHIANLAGSPAIKKGILQTVKVVDELVKVMGRHKPENIVIEMARENQTTQKGQKNSRERMKRIEEGIKELGSQILKEHPVENTQLQNEKLYLYYLQNGRDMYVDQELDINRLSDYDVDHIVPQSFLKDDSIDNKVLTRSDKARGKSDNVPSEEVVKKMKNYWRQLLNAKLITQRKFDNLTKAERGGLSELDKAGFIKRQLVETRQITKHVAQILDSRMNTKYDENDKLIREVKVITLKSKLVSDFRKDFQFYKVREINNYHHAHDAYLNAVVGTALIKKYPKLESEFVYGDYKVYDVRKMIAKSEQEIGKATAKYFFYSNIMNFFKTEITLANGEIRKRPLIETNGETGEIVWDKGRDFATVRKVLSMPQVNIVKKTEVQTGGFSKESILPKRNSDKLIARKKDWDPKKYGGFDSPTVAYSVLVVAKVEKGKSKKLKSVKELLGITIMERSSFEKNPIDFLEAKGYKEVKKDLIIKLPKYSLFELENGRKRMLASAGELQKGNELALPSKYVNFLYLASHYEKLKGSPEDNEQKQLFVEQHKHYLDEIIEQISEFSKRVILADANLDKVLSAYNKHRDKPIREQAENIIHLFTLTNLGAPAAFKYFDTTIDRKRYTSTKEVLDATLIHQSITGLYETRIDLSQLGGDGGPAPGGGGSSGGLGIEDEYRLHETSTEPDVSLGSTWLSDFPQAWAETGGMGLAVRQAPLIIPLKATSTPVSIQQYPMSHEARLGIKPHIQRLLDQGILVPCQSPWNTPLLPVKKPGTNDYRPVQDLREVNKRVEDIHPTVPNPYNLLSGLPPSHQWYTVLDLKDAFFCLRLHPTSQPLFAFEWRDPGMGISGQLTWTRLPQGFKNSPTLFNEALHRDLADFRIQHPDLILLQYVDDILLAATSELDCQQGTRALLQTLGDLGYRASAKKAQICQKQVKYLGYLLREGQRWLTEARKETVMGQPVPKTPRQLREFLGKAGFCRLFIPGFAEMAAPLYPLTKPGTLFSWGPDQQKAYQEIKQALLTAPALGLPDLTKPFELFVDEKQGYAKGVLTQKLGPWRRPVAYLSKKLDPVAAGWPPCLRMVAAIAVLTKDAGKLTMGQPLVILAPHAVEALVKQPPDRWLSNARMTHYQAMLLDTDRVQFGPVVALNPATLLPLPEEGAPHDCLEILAETHGTRPDLTDQPIPDADHTWYTDGSSFLQEGQRKAGAAVTTETEVIWAGALPAGTSAQRAELIALTQALKMAEGKRLNVYTDSRYAFATAHIHGEIYRRRGWLTSEGREIKNKSEILALLKALFLPKRLSIIHCLGHQKGDSAEARGNRLADQAAREAAIKTPPDTSTLLIAGKRTADGSEFEKRTADGSEFESPKKKAKVEGSGEGRGSLLTCGDVEENPG

SEQ ID NO: 3681 - protein, 2116 aa, synthetic construct
MPAAKRVKLDGGDKKYSIGLDIGTNSVGWAVITDEYKVPSKKFKVLGNTDRHSIKKNLIGALLFDSGETAEATRLKRTARRRYTRRKNRICYLQEIFSNEMAKVDDSFFHRLEESFLVEEDKKHERHPIFGNIVDEVAYHEKYPTIYHLRKKLVDSTDKADLRLIYLALAHMIKFRGHFLIEGDLNPDNSDVDKLFIQLVQTYNQLFEENPINASGVDAKAILSARLSKSRRLENLIAQLPGEKKNGLFGNLIALSLGLTPNFKSNFDLAEDAKLQLSKDTYDDDLDNLLAQIGDQYADLFLAAKNLSDAILLSDILRVNTEITKAPLSASMIKRYDEHHQDLTLLKALVRQQLPEKYKEIFFDQSKNGYAGYIDGGASQEEFYKFIKPILEKMDGTEELLVKLNREDLLRKQRTFDNGSIPHQIHLGELHAILRRQEDFYPFLKDNREKIEKILTFRIPYYVGPLARGNSRFAWMTRKSEETITPWNFEEVVDKGASAQSFIERMTNFDKNLPNEKVLPKHSLLYEYFTVYNELTKVKYVTEGMRKPAFLSGEQKKAIVDLLFKTNRKVTVKQLKEDYFKKIECFDSVEISGVEDRFNASLGTYHDLLKIIKDKDFLDNEENEDILEDIVLTLTLFEDREMIEERLKTYAHLFDDKVMKQLKRRRYTGWGRLSRKLINGIRDKQSGKTILDFLKSDGFANRNFMQLIHDDSLTFKEDIQKAQVSGQGDSLHEHIANLAGSPAIKKGILQTVKVVDELVKVMGRHKPENIVIEMARENQTTQKGQKNSRERMKRIEEGIKELGSQILKEHPVENTQLQNEKLYLYYLQNGRDMYVDQELDINRLSDYDVDHIVPQSFLKDDSIDNKVLTRSDKARGKSDNVPSEEVVKKMKNYWRQLLNAKLITQRKFDNLTKAERGGLSELDKAGFIKRQLVETRQITKHVAQILDSRMNTKYDENDKLIREVKVITLKSKLVSDFRKDFQFYKVREINNYHHAHDAYLNAVVGTALIKKYPKLESEFVYGDYKVYDVRKMIAKSEQEIGKATAKYFFYSNIMNFFKTEITLANGEIRKRPLIETNGETGEIVWDKGRDFATVRKVLSMPQVNIVKKTEVQTGGFSKESILPKRNSDKLIARKKDWDPKKYGGFDSPTVAYSVLVVAKVEKGKSKKLKSVKELLGITIMERSSFEKNPIDFLEAKGYKEVKKDLIIKLPKYSLFELENGRKRMLASAGELQKGNELALPSKYVNFLYLASHYEKLKGSPEDNEQKQLFVEQHKHYLDEIIEQISEFSKRVILADANLDKVLSAYNKHRDKPIREQAENIIHLFTLTNLGAPAAFKYFDTTIDRKRYTSTKEVLDATLIHQSITGLYETRIDLSQLGGDGGPAPGSSEAAAKGGLGIEDEYRLHETSTEPDVSLGSTWLSDFPQAWAETGGMGLAVRQAPLIIPLKATSTPVSIQQYPMSHEARLGIKPHIQRLLDQGILVPCQSPWNTPLLPVKKPGTNDYRPVQDLREVNKRVEDIHPTVPNPYNLLSGLPPSHQWYTVLDLKDAFFCLRLHPTSQPLFAFEWRDPGMGISGQLTWTRLPQGFKNSPTLFNEALHRDLADFRIQHPDLILLQYVDDILLAATSELDCQQGTRALLQTLGDLGYRASAKKAQICQKQVKYLGYLLREGQRWLTEARKETVMGQPVPKTPRQLREFLGKAGFCRLFIPGFAEMAAPLYPLTKPGTLFSWGPDQQKAYQEIKQALLTAPALGLPDLTKPFELFVDEKQGYAKGVLTQKLGPWRRPVAYLSKKLDPVAAGWPPCLRMVAAIAVLTKDAGKLTMGQPLVILAPHAVEALVKQPPDRWLSNARMTHYQAMLLDTDRVQFGPVVALNPATLLPLPEEGAPHDCLEILAETHGTRPDLTDQPIPDADHTWYTDGSSFLQEGQRKAGAAVTTETEVIWAGALPAGTSAQRAELIALTQALKMAEGKRLNVYTDSRYAFATAHIHGEIYRRRGWLTSEGREIKNKSEILALLKALFLPKRLSIIHCLGHQKGDSAEARGNRLADQAAREAAIKTPPDTSTLLIAGKRTADGSEFEKRTADGSEFESPKKKAKVEGSGEGRGSLLTCGDVEENPG

SEQ ID NO: 3682 - protein, 2120 aa, synthetic construct
MPAAKRVKLDGGDKKYSIGLDIGTNSVGWAVITDEYKVPSKKFKVLGNTDRHSIKKNLIGALLFDSGETAEATRLKRTARRRYTRRKNRICYLQEIFSNEMAKVDDSFFHRLEESFLVEEDKKHERHPIFGNIVDEVAYHEKYPTIYHLRKKLVDSTDKADLRLIYLALAHMIKFRGHFLIEGDLNPDNSDVDKLFIQLVQTYNQLFEENPINASGVDAKAILSARLSKSRRLENLIAQLPGEKKNGLFGNLIALSLGLTPNFKSNFDLAEDAKLQLSKDTYDDDLDNLLAQIGDQYADLFLAAKNLSDAILLSDILRVNTEITKAPLSASMIKRYDEHHQDLTLLKALVRQQLPEKYKEIFFDQSKNGYAGYIDGGASQEEFYKFIKPILEKMDGTEELLVKLNREDLLRKQRTFDNGSIPHQIHLGELHAILRRQEDFYPFLKDNREKIEKILTFRIPYYVGPLARGNSRFAWMTRKSEETITPWNFEEVVDKGASAQSFIERMTNFDKNLPNEKVLPKHSLLYEYFTVYNELTKVKYVTEGMRKPAFLSGEQKKAIVDLLFKTNRKVTVKQLKEDYFKKIECFDSVEISGVEDRFNASLGTYHDLLKIIKDKDFLDNEENEDILEDIVLTLTLFEDREMIEERLKTYAHLFDDKVMKQLKRRRYTGWGRLSRKLINGIRDKQSGKTILDFLKSDGFANRNFMQLIHDDSLTFKEDIQKAQVSGQGDSLHEHIANLAGSPAIKKGILQTVKVVDELVKVMGRHKPENIVIEMARENQTTQKGQKNSRERMKRIEEGIKELGSQILKEHPVENTQLQNEKLYLYYLQNGRDMYVDQELDINRLSDYDVDHIVPQSFLKDDSIDNKVLTRSDKARGKSDNVPSEEVVKKMKNYWRQLLNAKLITQRKFDNLTKAERGGLSELDKAGFIKRQLVETRQITKHVAQILDSRMNTKYDENDKLIREVKVITLKSKLVSDFRKDFQFYKVREINNYHHAHDAYLNAVVGTALIKKYPKLESEFVYGDYKVYDVRKMIAKSEQEIGKATAKYFFYSNIMNFFKTEITLANGEIRKRPLIETNGETGEIVWDKGRDFATVRKVLSMPQVNIVKKTEVQTGGFSKESILPKRNSDKLIARKKDWDPKKYGGFDSPTVAYSVLVVAKVEKGKSKKLKSVKELLGITIMERSSFEKNPIDFLEAKGYKEVKKDLIIKLPKYSLFELENGRKRMLASAGELQKGNELALPSKYVNFLYLASHYEKLKGSPEDNEQKQLFVEQHKHYLDEIIEQISEFSKRVILADANLDKVLSAYNKHRDKPIREQAENIIHLFTLTNLGAPAAFKYFDTTIDRKRYTSTKEVLDATLIHQSITGLYETRIDLSQLGGDGGEAAAKGGGGSEAAAKGGLGIEDEYRLHETSTEPDVSLGSTWLSDFPQAWAETGGMGLAVRQAPLIIPLKATSTPVSIQQYPMSHEARLGIKPHIQRLLDQGILVPCQSPWNTPLLPVKKPGTNDYRPVQDLREVNKRVEDIHPTVPNPYNLLSGLPPSHQWYTVLDLKDAFFCLRLHPTSQPLFAFEWRDPGMGISGQLTWTRLPQGFKNSPTLFNEALHRDLADFRIQHPDLILLQYVDDILLAATSELDCQQGTRALLQTLGDLGYRASAKKAQICQKQVKYLGYLLREGQRWLTEARKETVMGQPVPKTPRQLREFLGKAGFCRLFIPGFAEMAAPLYPLTKPGTLFSWGPDQQKAYQEIKQALLTAPALGLPDLTKPFELFVDEKQGYAKGVLTQKLGPWRRPVAYLSKKLDPVAAGWPPCLRMVAAIAVLTKDAGKLTMGQPLVILAPHAVEALVKQPPDRWLSNARMTHYQAMLLDTDRVQFGPVVALNPATLLPLPEEGAPHDCLEILAETHGTRPDLTDQPIPDADHTWYTDGSSFLQEGQRKAGAAVTTETEVIWAGALPAGTSAQRAELIALTQALKMAEGKRLNVYTDSRYAFATAHIHGEIYRRRGWLTSEGREIKNKSEILALLKALFLPKRLSIIHCLGHQKGDSAEARGNRLADQAAREAAIKTPPDTSTLLIAGKRTADGSEFEKRTADGSEFESPKKKAKVEGSGEGRGSLLTCGDVEENPG

SEQ ID NO: 3683 - protein, 2114 aa, synthetic construct
MPAAKRVKLDGGDKKYSIGLDIGTNSVGWAVITDEYKVPSKKFKVLGNTDRHSIKKNLIGALLFDSGETAEATRLKRTARRRYTRRKNRICYLQEIFSNEMAKVDDSFFHRLEESFLVEEDKKHERHPIFGNIVDEVAYHEKYPTIYHLRKKLVDSTDKADLRLIYLALAHMIKFRGHFLIEGDLNPDNSDVDKLFIQLVQTYNQLFEENPINASGVDAKAILSARLSKSRRLENLIAQLPGEKKNGLFGNLIALSLGLTPNFKSNFDLAEDAKLQLSKDTYDDDLDNLLAQIGDQYADLFLAAKNLSDAILLSDILRVNTEITKAPLSASMIKRYDEHHQDLTLLKALVRQQLPEKYKEIFFDQSKNGYAGYIDGGASQEEFYKFIKPILEKMDGTEELLVKLNREDLLRKQRTFDNGSIPHQIHLGELHAILRRQEDFYPFLKDNREKIEKILTFRIPYYVGPLARGNSRFAWMTRKSEETITPWNFEEVVDKGASAQSFIERMTNFDKNLPNEKVLPKHSLLYEYFTVYNELTKVKYVTEGMRKPAFLSGEQKKAIVDLLFKTNRKVTVKQLKEDYFKKIECFDSVEISGVEDRFNASLGTYHDLLKIIKDKDFLDNEENEDILEDIVLTLTLFEDREMIEERLKTYAHLFDDKVMKQLKRRRYTGWGRLSRKLINGIRDKQSGKTILDFLKSDGFANRNFMQLIHDDSLTFKEDIQKAQVSGQGDSLHEHIANLAGSPAIKKGILQTVKVVDELVKVMGRHKPENIVIEMARENQTTQKGQKNSRERMKRIEEGIKELGSQILKEHPVENTQLQNEKLYLYYLQNGRDMYVDQELDINRLSDYDVDHIVPQSFLKDDSIDNKVLTRSDKARGKSDNVPSEEVVKKMKNYWRQLLNAKLITQRKFDNLTKAERGGLSELDKAGFIKRQLVETRQITKHVAQILDSRMNTKYDENDKLIREVKVITLKSKLVSDFRKDFQFYKVREINNYHHAHDAYLNAVVGTALIKKYPKLESEFVYGDYKVYDVRKMIAKSEQEIGKATAKYFFYSNIMNFFKTEITLANGEIRKRPLIETNGETGEIVWDKGRDFATVRKVLSMPQVNIVKKTEVQTGGFSKESILPKRNSDKLIARKKDWDPKKYGGFDSPTVAYSVLVVAKVEKGKSKKLKSVKELLGITIMERSSFEKNPIDFLEAKGYKEVKKDLIIKLPKYSLFELENGRKRMLASAGELQKGNELALPSKYVNFLYLASHYEKLKGSPEDNEQKQLFVEQHKHYLDEIIEQISEFSKRVILADANLDKVLSAYNKHRDKPIREQAENIIHLFTLTNLGAPAAFKYFDTTIDRKRYTSTKEVLDATLIHQSITGLYETRIDLSQLGGDGGGGSPAPGGGGGLGIEDEYRLHETSTEPDVSLGSTWLSDFPQAWAETGGMGLAVRQAPLIIPLKATSTPVSIQQYPMSHEARLGIKPHIQRLLDQGILVPCQSPWNTPLLPVKKPGTNDYRPVQDLREVNKRVEDIHPTVPNPYNLLSGLPPSHQWYTVLDLKDAFFCLRLHPTSQPLFAFEWRDPGMGISGQLTWTRLPQGFKNSPTLFNEALHRDLADFRIQHPDLILLQYVDDILLAATSELDCQQGTRALLQTLGDLGYRASAKKAQICQKQVKYLGYLLREGQRWLTEARKETVMGQPVPKTPRQLREFLGKAGFCRLFIPGFAEMAAPLYPLTKPGTLFSWGPDQQKAYQEIKQALLTAPALGLPDLTKPFELFVDEKQGYAKGVLTQKLGPWRRPVAYLSKKLDPVAAGWPPCLRMVAAIAVLTKDAGKLTMGQPLVILAPHAVEALVKQPPDRWLSNARMTHYQAMLLDTDRVQFGPVVALNPATLLPLPEEGAPHDCLEILAETHGTRPDLTDQPIPDADHTWYTDGSSFLQEGQRKAGAAVTTETEVIWAGALPAGTSAQRAELIALTQALKMAEGKRLNVYTDSRYAFATAHIHGEIYRRRGWLTSEGREIKNKSEILALLKALFLPKRLSIIHCLGHQKGDSAEARGNRLADQAAREAAIKTPPDTSTLLIAGKRTADGSEFEKRTADGSEFESPKKKAKVEGSGEGRGSLLTCGDVEENPG

SEQ ID NO: 3684 - protein, 2116 aa, synthetic construct
MPAAKRVKLDGGDKKYSIGLDIGTNSVGWAVITDEYKVPSKKFKVLGNTDRHSIKKNLIGALLFDSGETAEATRLKRTARRRYTRRKNRICYLQEIFSNEMAKVDDSFFHRLEESFLVEEDKKHERHPIFGNIVDEVAYHEKYPTIYHLRKKLVDSTDKADLRLIYLALAHMIKFRGHFLIEGDLNPDNSDVDKLFIQLVQTYNQLFEENPINASGVDAKAILSARLSKSRRLENLIAQLPGEKKNGLFGNLIALSLGLTPNFKSNFDLAEDAKLQLSKDTYDDDLDNLLAQIGDQYADLFLAAKNLSDAILLSDILRVNTEITKAPLSASMIKRYDEHHQDLTLLKALVRQQLPEKYKEIFFDQSKNGYAGYIDGGASQEEFYKFIKPILEKMDGTEELLVKLNREDLLRKQRTFDNGSIPHQIHLGELHAILRRQEDFYPFLKDNREKIEKILTFRIPYYVGPLARGNSRFAWMTRKSEETITPWNFEEVVDKGASAQSFIERMTNFDKNLPNEKVLPKHSLLYEYFTVYNELTKVKYVTEGMRKPAFLSGEQKKAIVDLLFKTNRKVTVKQLKEDYFKKIECFDSVEISGVEDRFNASLGTYHDLLKIIKDKDFLDNEENEDILEDIVLTLTLFEDREMIEERLKTYAHLFDDKVMKQLKRRRYTGWGRLSRKLINGIRDKQSGKTILDFLKSDGFANRNFMQLIHDDSLTFKEDIQKAQVSGQGDSLHEHIANLAGSPAIKKGILQTVKVVDELVKVMGRHKPENIVIEMARENQTTQKGQKNSRERMKRIEEGIKELGSQILKEHPVENTQLQNEKLYLYYLQNGRDMYVDQELDINRLSDYDVDHIVPQSFLKDDSIDNKVLTRSDKARGKSDNVPSEEVVKKMKNYWRQLLNAKLITQRKFDNLTKAERGGLSELDKAGFIKRQLVETRQITKHVAQILDSRMNTKYDENDKLIREVKVITLKSKLVSDFRKDFQFYKVREINNYHHAHDAYLNAVVGTALIKKYPKLESEFVYGDYKVYDVRKMIAKSEQEIGKATAKYFFYSNIMNFFKTEITLANGEIRKRPLIETNGETGEIVWDKGRDFATVRKVLSMPQVNIVKKTEVQTGGFSKESILPKRNSDKLIARKKDWDPKKYGGFDSPTVAYSVLVVAKVEKGKSKKLKSVKELLGITIMERSSFEKNPIDFLEAKGYKEVKKDLIIKLPKYSLFELENGRKRMLASAGELQKGNELALPSKYVNFLYLASHYEKLKGSPEDNEQKQLFVEQHKHYLDEIIEQISEFSKRVILADANLDKVLSAYNKHRDKPIREQAENIIHLFTLTNLGAPAAFKYFDTTIDRKRYTSTKEVLDATLIHQSITGLYETRIDLSQLGGDGGPAPGGSEAAAKGGLGIEDEYRLHETSTEPDVSLGSTWLSDFPQAWAETGGMGLAVRQAPLIIPLKATSTPVSIQQYPMSHEARLGIKPHIQRLLDQGILVPCQSPWNTPLLPVKKPGTNDYRPVQDLREVNKRVEDIHPTVPNPYNLLSGLPPSHQWYTVLDLKDAFFCLRLHPTSQPLFAFEWRDPGMGISGQLTWTRLPQGFKNSPTLFNEALHRDLADFRIQHPDLILLQYVDDILLAATSELDCQQGTRALLQTLGDLGYRASAKKAQICQKQVKYLGYLLREGQRWLTEARKETVMGQPVPKTPRQLREFLGKAGFCRLFIPGFAEMAAPLYPLTKPGTLFSWGPDQQKAYQEIKQALLTAPALGLPDLTKPFELFVDEKQGYAKGVLTQKLGPWRRPVAYLSKKLDPVAAGWPPCLRMVAAIAVLTKDAGKLTMGQPLVILAPHAVEALVKQPPDRWLSNARMTHYQAMLLDTDRVQFGPVVALNPATLLPLPEEGAPHDCLEILAETHGTRPDLTDQPIPDADHTWYTDGSSFLQEGQRKAGAAVTTETEVIWAGALPAGTSAQRAELIALTQALKMAEGKRLNVYTDSRYAFATAHIHGEIYRRRGWLTSEGREIKNKSEILALLKALFLPKRLSIIHCLGHQKGDSAEARGNRLADQAAREAAIKTPPDTSTLLIAGKRTADGSEFEKRTADGSEFESPKKKAKVEGSGEGRGSLLTCGDVEENPG

SEQ ID NO: 3685 - protein, 2116 aa, synthetic construct
MPAAKRVKLDGGDKKYSIGLDIGTNSVGWAVITDEYKVPSKKFKVLGNTDRHSIKKNLIGALLFDSGETAEATRLKRTARRRYTRRKNRICYLQEIFSNEMAKVDDSFFHRLEESFLVEEDKKHERHPIFGNIVDEVAYHEKYPTIYHLRKKLVDSTDKADLRLIYLALAHMIKFRGHFLIEGDLNPDNSDVDKLFIQLVQTYNQLFEENPINASGVDAKAILSARLSKSRRLENLIAQLPGEKKNGLFGNLIALSLGLTPNFKSNFDLAEDAKLQLSKDTYDDDLDNLLAQIGDQYADLFLAAKNLSDAILLSDILRVNTEITKAPLSASMIKRYDEHHQDLTLLKALVRQQLPEKYKEIFFDQSKNGYAGYIDGGASQEEFYKFIKPILEKMDGTEELLVKLNREDLLRKQRTFDNGSIPHQIHLGELHAILRRQEDFYPFLKDNREKIEKILTFRIPYYVGPLARGNSRFAWMTRKSEETITPWNFEEVVDKGASAQSFIERMTNFDKNLPNEKVLPKHSLLYEYFTVYNELTKVKYVTEGMRKPAFLSGEQKKAIVDLLFKTNRKVTVKQLKEDYFKKIECFDSVEISGVEDRFNASLGTYHDLLKIIKDKDFLDNEENEDILEDIVLTLTLFEDREMIEERLKTYAHLFDDKVMKQLKRRRYTGWGRLSRKLINGIRDKQSGKTILDFLKSDGFANRNFMQLIHDDSLTFKEDIQKAQVSGQGDSLHEHIANLAGSPAIKKGILQTVKVVDELVKVMGRHKPENIVIEMARENQTTQKGQKNSRERMKRIEEGIKELGSQILKEHPVENTQLQNEKLYLYYLQNGRDMYVDQELDINRLSDYDVDHIVPQSFLKDDSIDNKVLTRSDKARGKSDNVPSEEVVKKMKNYWRQLLNAKLITQRKFDNLTKAERGGLSELDKAGFIKRQLVETRQITKHVAQILDSRMNTKYDENDKLIREVKVITLKSKLVSDFRKDFQFYKVREINNYHHAHDAYLNAVVGTALIKKYPKLESEFVYGDYKVYDVRKMIAKSEQEIGKATAKYFFYSNIMNFFKTEITLANGEIRKRPLIETNGETGEIVWDKGRDFATVRKVLSMPQVNIVKKTEVQTGGFSKESILPKRNSDKLIARKKDWDPKKYGGFDSPTVAYSVLVVAKVEKGKSKKLKSVKELLGITIMERSSFEKNPIDFLEAKGYKEVKKDLIIKLPKYSLFELENGRKRMLASAGELQKGNELALPSKYVNFLYLASHYEKLKGSPEDNEQKQLFVEQHKHYLDEIIEQISEFSKRVILADANLDKVLSAYNKHRDKPIREQAENIIHLFTLTNLGAPAAFKYFDTTIDRKRYTSTKEVLDATLIHQSITGLYETRIDLSQLGGDGGPAPEAAAKGGSGGLGIEDEYRLHETSTEPDVSLGSTWLSDFPQAWAETGGMGLAVRQAPLIIPLKATSTPVSIQQYPMSHEARLGIKPHIQRLLDQGILVPCQSPWNTPLLPVKKPGTNDYRPVQDLREVNKRVEDIHPTVPNPYNLLSGLPPSHQWYTVLDLKDAFFCLRLHPTSQPLFAFEWRDPGMGISGQLTWTRLPQGFKNSPTLFNEALHRDLADFRIQHPDLILLQYVDDILLAATSELDCQQGTRALLQTLGDLGYRASAKKAQICQKQVKYLGYLLREGQRWLTEARKETVMGQPVPKTPRQLREFLGKAGFCRLFIPGFAEMAAPLYPLTKPGTLFSWGPDQQKAYQEIKQALLTAPALGLPDLTKPFELFVDEKQGYAKGVLTQKLGPWRRPVAYLSKKLDPVAAGWPPCLRMVAAIAVLTKDAGKLTMGQPLVILAPHAVEALVKQPPDRWLSNARMTHYQAMLLDTDRVQFGPVVALNPATLLPLPEEGAPHDCLEILAETHGTRPDLTDQPIPDADHTWYTDGSSFLQEGQRKAGAAVTTETEVIWAGALPAGTSAQRAELIALTQALKMAEGKRLNVYTDSRYAFATAHIHGEIYRRRGWLTSEGREIKNKSEILALLKALFLPKRLSIIHCLGHQKGDSAEARGNRLADQAAREAAIKTPPDTSTLLIAGKRTADGSEFEKRTADGSEFESPKKKAKVEGSGEGRGSLLTCGDVEENPG

SEQ ID NO: 3686 - protein, 2151 aa, synthetic construct
MPAAKRVKLDGGDKKYSIGLDIGTNSVGWAVITDEYKVPSKKFKVLGNTDRHSIKKNLIGALLFDSGETAEATRLKRTARRRYTRRKNRICYLQEIFSNEMAKVDDSFFHRLEESFLVEEDKKHERHPIFGNIVDEVAYHEKYPTIYHLRKKLVDSTDKADLRLIYLALAHMIKFRGHFLIEGDLNPDNSDVDKLFIQLVQTYNQLFEENPINASGVDAKAILSARLSKSRRLENLIAQLPGEKKNGLFGNLIALSLGLTPNFKSNFDLAEDAKLQLSKDTYDDDLDNLLAQIGDQYADLFLAAKNLSDAILLSDILRVNTEITKAPLSASMIKRYDEHHQDLTLLKALVRQQLPEKYKEIFFDQSKNGYAGYIDGGASQEEFYKFIKPILEKMDGTEELLVKLNREDLLRKQRTFDNGSIPHQIHLGELHAILRRQEDFYPFLKDNREKIEKILTFRIPYYVGPLARGNSRFAWMTRKSEETITPWNFEEVVDKGASAQSFIERMTNFDKNLPNEKVLPKHSLLYEYFTVYNELTKVKYVTEGMRKPAFLSGEQKKAIVDLLFKTNRKVTVKQLKEDYFKKIECFDSVEISGVEDRFNASLGTYHDLLKIIKDKDFLDNEENEDILEDIVLTLTLFEDREMIEERLKTYAHLFDDKVMKQLKRRRYTGWGRLSRKLINGIRDKQSGKTILDFLKSDGFANRNFMQLIHDDSLTFKEDIQKAQVSGQGDSLHEHIANLAGSPAIKKGILQTVKVVDELVKVMGRHKPENIVIEMARENQTTQKGQKNSRERMKRIEEGIKELGSQILKEHPVENTQLQNEKLYLYYLQNGRDMYVDQELDINRLSDYDVDHIVPQSFLKDDSIDNKVLTRSDKARGKSDNVPSEEVVKKMKNYWRQLLNAKLITQRKFDNLTKAERGGLSELDKAGFIKRQLVETRQITKHVAQILDSRMNTKYDENDKLIREVKVITLKSKLVSDFRKDFQFYKVREINNYHHAHDAYLNAVVGTALIKKYPKLESEFVYGDYKVYDVRKMIAKSEQEIGKATAKYFFYSNIMNFFKTEITLANGEIRKRPLIETNGETGEIVWDKGRDFATVRKVLSMPQVNIVKKTEVQTGGFSKESILPKRNSDKLIARKKDWDPKKYGGFDSPTVAYSVLVVAKVEKGKSKKLKSVKELLGITIMERSSFEKNPIDFLEAKGYKEVKKDLIIKLPKYSLFELENGRKRMLASAGELQKGNELALPSKYVNFLYLASHYEKLKGSPEDNEQKQLFVEQHKHYLDEIIEQISEFSKRVILADANLDKVLSAYNKHRDKPIREQAENIIHLFTLTNLGAPAAFKYFDTTIDRKRYTSTKEVLDATLIHQSITGLYETRIDLSQLGGDGGAEAAAKEAAAKEAAAKEAAAKALEAEAAAKEAAAKEAAAKEAAAKAGGLGIEDEYRLHETSTEPDVSLGSTWLSDFPQAWAETGGMGLAVRQAPLIIPLKATSTPVSIQQYPMSHEARLGIKPHIQRLLDQGILVPCQSPWNTPLLPVKKPGTNDYRPVQDLREVNKRVEDIHPTVPNPYNLLSGLPPSHQWYTVLDLKDAFFCLRLHPTSQPLFAFEWRDPGMGISGQLTWTRLPQGFKNSPTLFNEALHRDLADFRIQHPDLILLQYVDDILLAATSELDCQQGTRALLQTLGDLGYRASAKKAQICQKQVKYLGYLLREGQRWLTEARKETVMGQPVPKTPRQLREFLGKAGFCRLFIPGFAEMAAPLYPLTKPGTLFSWGPDQQKAYQEIKQALLTAPALGLPDLTKPFELFVDEKQGYAKGVLTQKLGPWRRPVAYLSKKLDPVAAGWPPCLRMVAAIAVLTKDAGKLTMGQPLVILAPHAVEALVKQPPDRWLSNARMTHYQAMLLDTDRVQFGPVVALNPATLLPLPEEGAPHDCLEILAETHGTRPDLTDQPIPDADHTWYTDGSSFLQEGQRKAGAAVTTETEVIWAGALPAGTSAQRAELIALTQALKMAEGKRLNVYTDSRYAFATAHIHGEIYRRRGWLTSEGREIKNKSEILALLKALFLPKRLSIIHCLGHQKGDSAEARGNRLADQAAREAAIKTPPDTSTLLIAGKRTADGSEFEKRTADGSEFESPKKKAKVEGSGEGRGSLLTCGDVEENPG

SEQ ID NO: 3687 - protein, 2080 aa, synthetic construct
MAPKKKRKVGIHGVPAADKKYSIGLDIGTNSVGWAVITDEYKVPSKKFKVLGNTDRHSIKKNLIGALLFDSGETAEATRLKRTARRRYTRRKNRICYLQEIFSNEMAKVDDSFFHRLEESFLVEEDKKHERHPIFGNIVDEVAYHEKYPTIYHLRKKLVDSTDKADLRLIYLALAHMIKFRGHFLIEGDLNPDNSDVDKLFIQLVQTYNQLFEENPINASGVDAKAILSARLSKSRRLENLIAQLPGEKKNGLFGNLIALSLGLTPNFKSNFDLAEDAKLQLSKDTYDDDLDNLLAQIGDQYADLFLAAKNLSDAILLSDILRVNTEITKAPLSASMIKRYDEHHQDLTLLKALVRQQLPEKYKEIFFDQSKNGYAGYIDGGASQEEFYKFIKPILEKMDGTEELLVKLNREDLLRKQRTFDNGSIPHQIHLGELHAILRRQEDFYPFLKDNREKIEKILTFRIPYYVGPLARGNSRFAWMTRKSEETITPWNFEEVVDKGASAQSFIERMTNFDKNLPNEKVLPKHSLLYEYFTVYNELTKVKYVTEGMRKPAFLSGEQKKAIVDLLFKTNRKVTVKQLKEDYFKKIECFDSVEISGVEDRFNASLGTYHDLLKIIKDKDFLDNEENEDILEDIVLTLTLFEDREMIEERLKTYAHLFDDKVMKQLKRRRYTGWGRLSRKLINGIRDKQSGKTILDFLKSDGFANRNFMQLIHDDSLTFKEDIQKAQVSGQGDSLHEHIANLAGSPAIKKGILQTVKVVDELVKVMGRHKPENIVIEMARENQTTQKGQKNSRERMKRIEEGIKELGSQILKEHPVENTQLQNEKLYLYYLQNGRDMYVDQELDINRLSDYDVDHIVPQSFLKDDSIDNKVLTRSDKARGKSDNVPSEEVVKKMKNYWRQLLNAKLITQRKFDNLTKAERGGLSELDKAGFIKRQLVETRQITKHVAQILDSRMNTKYDENDKLIREVKVITLKSKLVSDFRKDFQFYKVREINNYHHAHDAYLNAVVGTALIKKYPKLESEFVYGDYKVYDVRKMIAKSEQEIGKATAKYFFYSNIMNFFKTEITLANGEIRKRPLIETNGETGEIVWDKGRDFATVRKVLSMPQVNIVKKTEVQTGGFSKESILPKRNSDKLIARKKDWDPKKYGGFDSPTVAYSVLVVAKVEKGKSKKLKSVKELLGITIMERSSFEKNPIDFLEAKGYKEVKKDLIIKLPKYSLFELENGRKRMLASAGELQKGNELALPSKYVNFLYLASHYEKLKGSPEDNEQKQLFVEQHKHYLDEIIEQISEFSKRVILADANLDKVLSAYNKHRDKPIREQAENIIHLFTLTNLGAPAAFKYFDTTIDRKRYTSTKEVLDATLIHQSITGLYETRIDLSQLGGDSGGSSGGSSGSETPGTSESATPESSGGSSGGSSMDDEYRLYSPLVKPDQNIQFWLEQFPQAWAETAGMGLAKQVPPQVIQLKASATPVSVRQYPLSKEAQEGIRPHVQRLIQQGILVPVQSPWNTPLLPVRKPGTNDYRPVQDLREVNKRVQDIHPTVPNPYNLLCALPPQRSWYTVLDLKDAFFCLRLHPTSQPLFAFEWRDPGTGRTGQLTWTRLPQGFKNSPTIFNEALHRDLANFRIQHPQVTLLQYVDDLLLAGATKQDCLEGTKALLLELSDLGYRASAKKAQICRREVTYLGYSLRDGQRWLTEARKKTVVQIPAPTTAKQVREFLGKAGFCRLFIPGFATLAAPLYPLTKPKGEFSWAPEHQKAFDAIKKALLSAPALALPDVTKPFTLYVDERKGVARGVLTQTLGPWRRPVAYLSKKLDPVASGWPVCLKAIAAVAILVKDADKLTLGQNITVIAPHALENIVRQPPDRWMTNARMTHYQSLLLTERVTFAPPAALNPATLLPEETDEPVTHDCHQLLIEETGVRKDLTDIPLTGEVLTWFTDGSSYVVEGKRMAGAAVVDGTRTIWASSLPEGTSAQKAELMALTQALRLAEGKSINIYTDSRYAFATAHVHGAIYKQRGWLTSAGREIKNKEEILSLLEALHLPKRLAIIHCPGHQKAKDPISRGNQMADRVAKQAAQGVNLLP

SEQ ID NO: 3688 - protein, 2103 aa, synthetic construct
MKRTADGSEFESPKKKRKVDKKYSIGLDIGTNSVGWAVITDEYKVPSKKFKVLGNTDRHSIKKNLIGALLFDSGETAEATRLKRTARRRYTRRKNRICYLQEIFSNEMAKVDDSFFHRLEESFLVEEDKKHERHPIFGNIVDEVAYHEKYPTIYHLRKKLVDSTDKADLRLIYLALAHMIKFRGHFLIEGDLNPDNSDVDKLFIQLVQTYNQLFEENPINASGVDAKAILSARLSKSRRLENLIAQLPGEKKNGLFGNLIALSLGLTPNFKSNFDLAEDAKLQLSKDTYDDDLDNLLAQIGDQYADLFLAAKNLSDAILLSDILRVNTEITKAPLSASMIKRYDEHHQDLTLLKALVRQQLPEKYKEIFFDQSKNGYAGYIDGGASQEEFYKFIKPILEKMDGTEELLVKLNREDLLRKQRTFDNGSIPHQIHLGELHAILRRQEDFYPFLKDNREKIEKILTFRIPYYVGPLARGNSRFAWMTRKSEETITPWNFEEVVDKGASAQSFIERMTNFDKNLPNEKVLPKHSLLYEYFTVYNELTKVKYVTEGMRKPAFLSGEQKKAIVDLLFKTNRKVTVKQLKEDYFKKIECFDSVEISGVEDRFNASLGTYHDLLKIIKDKDFLDNEENEDILEDIVLTLTLFEDREMIEERLKTYAHLFDDKVMKQLKRRRYTGWGRLSRKLINGIRDKQSGKTILDFLKSDGFANRNFMQLIHDDSLTFKEDIQKAQVSGQGDSLHEHIANLAGSPAIKKGILQTVKVVDELVKVMGRHKPENIVIEMARENQTTQKGQKNSRERMKRIEEGIKELGSQILKEHPVENTQLQNEKLYLYYLQNGRDMYVDQELDINRLSDYDVDHIVPQSFLKDDSIDNKVLTRSDKARGKSDNVPSEEVVKKMKNYWRQLLNAKLITQRKFDNLTKAERGGLSELDKAGFIKRQLVETRQITKHVAQILDSRMNTKYDENDKLIREVKVITLKSKLVSDFRKDFQFYKVREINNYHHAHDAYLNAVVGTALIKKYPKLESEFVYGDYKVYDVRKMIAKSEQEIGKATAKYFFYSNIMNFFKTEITLANGEIRKRPLIETNGETGEIVWDKGRDFATVRKVLSMPQVNIVKKTEVQTGGFSKESILPKRNSDKLIARKKDWDPKKYGGFDSPTVAYSVLVVAKVEKGKSKKLKSVKELLGITIMERSSFEKNPIDFLEAKGYKEVKKDLIIKLPKYSLFELENGRKRMLASAGELQKGNELALPSKYVNFLYLASHYEKLKGSPEDNEQKQLFVEQHKHYLDEIIEQISEFSKRVILADANLDKVLSAYNKHRDKPIREQAENIIHLFTLTNLGAPAAFKYFDTTIDRKRYTSTKEVLDATLIHQSITGLYETRIDLSQLGGDSGGSSGGSSGSETPGTSESATPESSGGSSGGSSMDDEYRLYSPLVKPDQNIQFWLEQFPQAWAETAGMGLAKQVPPQVIQLKASATPVSVRQYPLSKEAQEGIRPHVQRLIQQGILVPVQSPWNTPLLPVRKPGTNDYRPVQDLREVNKRVQDIHPTVPNPYNLLCALPPQRSWYTVLDLKDAFFCLRLHPTSQPLFAFEWRDPGTGRTGQLTWTRLPQGFKNSPTIFNEALHRDLANFRIQHPQVTLLQYVDDLLLAGATKQDCLEGTKALLLELSDLGYRASAKKAQICRREVTYLGYSLRDGQRWLTEARKKTVVQIPAPTTAKQVREFLGKAGFCRLFIPGFATLAAPLYPLTKPKGEFSWAPEHQKAFDAIKKALLSAPALALPDVTKPFTLYVDERKGVARGVLTQTLGPWRRPVAYLSKKLDPVASGWPVCLKAIAAVAILVKDADKLTLGQNITVIAPHALENIVRQPPDRWMTNARMTHYQSLLLTERVTFAPPAALNPATLLPEETDEPVTHDCHQLLIEETGVRKDLTDIPLTGEVLTWFTDGSSYVVEGKRMAGAAVVDGTRTIWASSLPEGTSAQKAELMALTQALRLAEGKSINIYTDSRYAFATAHVHGAIYKQRGWLTSAGREIKNKEEILSLLEALHLPKRLAIIHCPGHQKAKDPISRGNQMADRVAKQAAQGVNLLPSGGSKRTADGSEFEPKKKRKV

SEQ ID NO: 3689 - protein, 2108 aa, synthetic construct
MPAAKRVKLDGGDKKYSIGLDIGTNSVGWAVITDEYKVPSKKFKVLGNTDRHSIKKNLIGALLFDSGETAEATRLKRTARRRYTRRKNRICYLQEIFSNEMAKVDDSFFHRLEESFLVEEDKKHERHPIFGNIVDEVAYHEKYPTIYHLRKKLVDSTDKADLRLIYLALAHMIKFRGHFLIEGDLNPDNSDVDKLFIQLVQTYNQLFEENPINASGVDAKAILSARLSKSRRLENLIAQLPGEKKNGLFGNLIALSLGLTPNFKSNFDLAEDAKLQLSKDTYDDDLDNLLAQIGDQYADLFLAAKNLSDAILLSDILRVNTEITKAPLSASMIKRYDEHHQDLTLLKALVRQQLPEKYKEIFFDQSKNGYAGYIDGGASQEEFYKFIKPILEKMDGTEELLVKLNREDLLRKQRTFDNGSIPHQIHLGELHAILRRQEDFYPFLKDNREKIEKILTFRIPYYVGPLARGNSRFAWMTRKSEETITPWNFEEVVDKGASAQSFIERMTNFDKNLPNEKVLPKHSLLYEYFTVYNELTKVKYVTEGMRKPAFLSGEQKKAIVDLLFKTNRKVTVKQLKEDYFKKIECFDSVEISGVEDRFNASLGTYHDLLKIIKDKDFLDNEENEDILEDIVLTLTLFEDREMIEERLKTYAHLFDDKVMKQLKRRRYTGWGRLSRKLINGIRDKQSGKTILDFLKSDGFANRNFMQLIHDDSLTFKEDIQKAQVSGQGDSLHEHIANLAGSPAIKKGILQTVKVVDELVKVMGRHKPENIVIEMARENQTTQKGQKNSRERMKRIEEGIKELGSQILKEHPVENTQLQNEKLYLYYLQNGRDMYVDQELDINRLSDYDVDHIVPQSFLKDDSIDNKVLTRSDKARGKSDNVPSEEVVKKMKNYWRQLLNAKLITQRKFDNLTKAERGGLSELDKAGFIKRQLVETRQITKHVAQILDSRMNTKYDENDKLIREVKVITLKSKLVSDFRKDFQFYKVREINNYHHAHDAYLNAVVGTALIKKYPKLESEFVYGDYKVYDVRKMIAKSEQEIGKATAKYFFYSNIMNFFKTEITLANGEIRKRPLIETNGETGEIVWDKGRDFATVRKVLSMPQVNIVKKTEVQTGGFSKESILPKRNSDKLIARKKDWDPKKYGGFDSPTVAYSVLVVAKVEKGKSKKLKSVKELLGITIMERSSFEKNPIDFLEAKGYKEVKKDLIIKLPKYSLFELENGRKRMLASAGELQKGNELALPSKYVNFLYLASHYEKLKGSPEDNEQKQLFVEQHKHYLDEIIEQISEFSKRVILADANLDKVLSAYNKHRDKPIREQAENIIHLFTLTNLGAPAAFKYFDTTIDRKRYTSTKEVLDATLIHQSITGLYETRIDLSQLGGDSGGSSGGSSGSETPGTSESATPESSGGSSGGSSMDDEYRLYSPLVKPDQNIQFWLEQFPQAWAETAGMGLAKQVPPQVIQLKASATPVSVRQYPLSKEAQEGIRPHVQRLIQQGILVPVQSPWNTPLLPVRKPGTNDYRPVQDLREVNKRVQDIHPTVPNPYNLLCALPPQRSWYTVLDLKDAFFCLRLHPTSQPLFAFEWRDPGTGRTGQLTWTRLPQGFKNSPTIFNEALHRDLANFRIQHPQVTLLQYVDDLLLAGATKQDCLEGTKALLLELSDLGYRASAKKAQICRREVTYLGYSLRDGQRWLTEARKKTVVQIPAPTTAKQVREFLGKAGFCRLFIPGFATLAAPLYPLTKPKGEFSWAPEHQKAFDAIKKALLSAPALALPDVTKPFTLYVDERKGVARGVLTQTLGPWRRPVAYLSKKLDPVASGWPVCLKAIAAVAILVKDADKLTLGQNITVIAPHALENIVRQPPDRWMTNARMTHYQSLLLTERVTFAPPAALNPATLLPEETDEPVTHDCHQLLIEETGVRKDLTDIPLTGEVLTWFTDGSSYVVEGKRMAGAAVVDGTRTIWASSLPEGTSAQKAELMALTQALRLAEGKSINIYTDSRYAFATAHVHGAIYKQRGWLTSAGREIKNKEEILSLLEALHLPKRLAIIHCPGHQKAKDPISRGNQMADRVAKQAAQGVNLLPSGGSKRTADGSEFEKRTADGSEFESPKKKAKVE

SEQ ID NO: 3690 - protein, 2130 aa, synthetic construct
MPAAKRVKLDGGDKKYSIGLDIGTNSVGWAVITDEYKVPSKKFKVLGNTDRHSIKKNLIGALLFDSGETAEATRLKRTARRRYTRRKNRICYLQEIFSNEMAKVDDSFFHRLEESFLVEEDKKHERHPIFGNIVDEVAYHEKYPTIYHLRKKLVDSTDKADLRLIYLALAHMIKFRGHFLIEGDLNPDNSDVDKLFIQLVQTYNQLFEENPINASGVDAKAILSARLSKSRRLENLIAQLPGEKKNGLFGNLIALSLGLTPNFKSNFDLAEDAKLQLSKDTYDDDLDNLLAQIGDQYADLFLAAKNLSDAILLSDILRVNTEITKAPLSASMIKRYDEHHQDLTLLKALVRQQLPEKYKEIFFDQSKNGYAGYIDGGASQEEFYKFIKPILEKMDGTEELLVKLNREDLLRKQRTFDNGSIPHQIHLGELHAILRRQEDFYPFLKDNREKIEKILTFRIPYYVGPLARGNSRFAWMTRKSEETITPWNFEEVVDKGASAQSFIERMTNFDKNLPNEKVLPKHSLLYEYFTVYNELTKVKYVTEGMRKPAFLSGEQKKAIVDLLFKTNRKVTVKQLKEDYFKKIECFDSVEISGVEDRFNASLGTYHDLLKIIKDKDFLDNEENEDILEDIVLTLTLFEDREMIEERLKTYAHLFDDKVMKQLKRRRYTGWGRLSRKLINGIRDKQSGKTILDFLKSDGFANRNFMQLIHDDSLTFKEDIQKAQVSGQGDSLHEHIANLAGSPAIKKGILQTVKVVDELVKVMGRHKPENIVIEMARENQTTQKGQKNSRERMKRIEEGIKELGSQILKEHPVENTQLQNEKLYLYYLQNGRDMYVDQELDINRLSDYDVDHIVPQSFLKDDSIDNKVLTRSDKARGKSDNVPSEEVVKKMKNYWRQLLNAKLITQRKFDNLTKAERGGLSELDKAGFIKRQLVETRQITKHVAQILDSRMNTKYDENDKLIREVKVITLKSKLVSDFRKDFQFYKVREINNYHHAHDAYLNAVVGTALIKKYPKLESEFVYGDYKVYDVRKMIAKSEQEIGKATAKYFFYSNIMNFFKTEITLANGEIRKRPLIETNGETGEIVWDKGRDFATVRKVLSMPQVNIVKKTEVQTGGFSKESILPKRNSDKLIARKKDWDPKKYGGFDSPTVAYSVLVVAKVEKGKSKKLKSVKELLGITIMERSSFEKNPIDFLEAKGYKEVKKDLIIKLPKYSLFELENGRKRMLASAGELQKGNELALPSKYVNFLYLASHYEKLKGSPEDNEQKQLFVEQHKHYLDEIIEQISEFSKRVILADANLDKVLSAYNKHRDKPIREQAENIIHLFTLTNLGAPAAFKYFDTTIDRKRYTSTKEVLDATLIHQSITGLYETRIDLSQLGGDGGSGGSSGGSSGSETPGTSESATPESSGGSSGGSSGGMDDEYRLYSPLVKPDQNIQFWLEQFPQAWAETAGMGLAKQVPPQVIQLKASATPVSVRQYPLSKEAQEGIRPHVQRLIQQGILVPVQSPWNTPLLPVRKPGTNDYRPVQDLREVNKRVQDIHPTVPNPYNLLCALPPQRSWYTVLDLKDAFFCLRLHPTSQPLFAFEWRDPGTGRTGQLTWTRLPQGFKNSPTIFNEALHRDLANFRIQHPQVTLLQYVDDLLLAGATKQDCLEGTKALLLELSDLGYRASAKKAQICRREVTYLGYSLRDGQRWLTEARKKTVVQIPAPTTAKQVREFLGKAGFCRLFIPGFATLAAPLYPLTKPKGEFSWAPEHQKAFDAIKKALLSAPALALPDVTKPFTLYVDERKGVARGVLTQTLGPWRRPVAYLSKKLDPVASGWPVCLKAIAAVAILVKDADKLTLGQNITVIAPHALENIVRQPPDRWMTNARMTHYQSLLLTERVTFAPPAALNPATLLPEETDEPVTHDCHQLLIEETGVRKDLTDIPLTGEVLTWFTDGSSYVVEGKRMAGAAVVDGTRTIWASSLPEGTSAQKAELMALTQALRLAEGKSINIYTDSRYAFATAHVHGAIYKQRGWLTSAGREIKNKEEILSLLEALHLPKRLAIIHCPGHQKAKDPISRGNQMADRVAKQAAQGVNLLPAGKRTADGSEFEKRTADGSEFESPKKKAKVEGSGEGRGSLLTCGDVEENPG

SEQ ID NO: 3691 - protein, 2108 aa, synthetic construct
MPAAKRVKLDGGDKKYSIGLDIGTNSVGWAVITDEYKVPSKKFKVLGNTDRHSIKKNLIGALLFDSGETAEATRLKRTARRRYTRRKNRICYLQEIFSNEMAKVDDSFFHRLEESFLVEEDKKHERHPIFGNIVDEVAYHEKYPTIYHLRKKLVDSTDKADLRLIYLALAHMIKFRGHFLIEGDLNPDNSDVDKLFIQLVQTYNQLFEENPINASGVDAKAILSARLSKSRRLENLIAQLPGEKKNGLFGNLIALSLGLTPNFKSNFDLAEDAKLQLSKDTYDDDLDNLLAQIGDQYADLFLAAKNLSDAILLSDILRVNTEITKAPLSASMIKRYDEHHQDLTLLKALVRQQLPEKYKEIFFDQSKNGYAGYIDGGASQEEFYKFIKPILEKMDGTEELLVKLNREDLLRKQRTFDNGSIPHQIHLGELHAILRRQEDFYPFLKDNREKIEKILTFRIPYYVGPLARGNSRFAWMTRKSEETITPWNFEEVVDKGASAQSFIERMTNFDKNLPNEKVLPKHSLLYEYFTVYNELTKVKYVTEGMRKPAFLSGEQKKAIVDLLFKTNRKVTVKQLKEDYFKKIECFDSVEISGVEDRFNASLGTYHDLLKIIKDKDFLDNEENEDILEDIVLTLTLFEDREMIEERLKTYAHLFDDKVMKQLKRRRYTGWGRLSRKLINGIRDKQSGKTILDFLKSDGFANRNFMQLIHDDSLTFKEDIQKAQVSGQGDSLHEHIANLAGSPAIKKGILQTVKVVDELVKVMGRHKPENIVIEMARENQTTQKGQKNSRERMKRIEEGIKELGSQILKEHPVENTQLQNEKLYLYYLQNGRDMYVDQELDINRLSDYDVDHIVPQSFLKDDSIDNKVLTRSDKARGKSDNVPSEEVVKKMKNYWRQLLNAKLITQRKFDNLTKAERGGLSELDKAGFIKRQLVETRQITKHVAQILDSRMNTKYDENDKLIREVKVITLKSKLVSDFRKDFQFYKVREINNYHHAHDAYLNAVVGTALIKKYPKLESEFVYGDYKVYDVRKMIAKSEQEIGKATAKYFFYSNIMNFFKTEITLANGEIRKRPLIETNGETGEIVWDKGRDFATVRKVLSMPQVNIVKKTEVQTGGFSKESILPKRNSDKLIARKKDWDPKKYGGFDSPTVAYSVLVVAKVEKGKSKKLKSVKELLGITIMERSSFEKNPIDFLEAKGYKEVKKDLIIKLPKYSLFELENGRKRMLASAGELQKGNELALPSKYVNFLYLASHYEKLKGSPEDNEQKQLFVEQHKHYLDEIIEQISEFSKRVILADANLDKVLSAYNKHRDKPIREQAENIIHLFTLTNLGAPAAFKYFDTTIDRKRYTSTKEVLDATLIHQSITGLYETRIDLSQLGGDGGPAPEAAAKGGGGGMDDEYRLYSPLVKPDQNIQFWLEQFPQAWAETAGMGLAKQVPPQVIQLKASATPVSVRQYPLSKEAQEGIRPHVQRLIQQGILVPVQSPWNTPLLPVRKPGTNDYRPVQDLREVNKRVQDIHPTVPNPYNLLCALPPQRSWYTVLDLKDAFFCLRLHPTSQPLFAFEWRDPGTGRTGQLTWTRLPQGFKNSPTIFNEALHRDLANFRIQHPQVTLLQYVDDLLLAGATKQDCLEGTKALLLELSDLGYRASAKKAQICRREVTYLGYSLRDGQRWLTEARKKTVVQIPAPTTAKQVREFLGKAGFCRLFIPGFATLAAPLYPLTKPKGEFSWAPEHQKAFDAIKKALLSAPALALPDVTKPFTLYVDERKGVARGVLTQTLGPWRRPVAYLSKKLDPVASGWPVCLKAIAAVAILVKDADKLTLGQNITVIAPHALENIVRQPPDRWMTNARMTHYQSLLLTERVTFAPPAALNPATLLPEETDEPVTHDCHQLLIEETGVRKDLTDIPLTGEVLTWFTDGSSYVVEGKRMAGAAVVDGTRTIWASSLPEGTSAQKAELMALTQALRLAEGKSINIYTDSRYAFATAHVHGAIYKQRGWLTSAGREIKNKEEILSLLEALHLPKRLAIIHCPGHQKAKDPISRGNQMADRVAKQAAQGVNLLPAGKRTADGSEFEKRTADGSEFESPKKKAKVEGSGEGRGSLLTCGDVEENPG

SEQ ID NO: 3692 - protein, 2115 aa, synthetic construct
MPAAKRVKLDGGDKKYSIGLDIGTNSVGWAVITDEYKVPSKKFKVLGNTDRHSIKKNLIGALLFDSGETAEATRLKRTARRRYTRRKNRICYLQEIFSNEMAKVDDSFFHRLEESFLVEEDKKHERHPIFGNIVDEVAYHEKYPTIYHLRKKLVDSTDKADLRLIYLALAHMIKFRGHFLIEGDLNPDNSDVDKLFIQLVQTYNQLFEENPINASGVDAKAILSARLSKSRRLENLIAQLPGEKKNGLFGNLIALSLGLTPNFKSNFDLAEDAKLQLSKDTYDDDLDNLLAQIGDQYADLFLAAKNLSDAILLSDILRVNTEITKAPLSASMIKRYDEHHQDLTLLKALVRQQLPEKYKEIFFDQSKNGYAGYIDGGASQEEFYKFIKPILEKMDGTEELLVKLNREDLLRKQRTFDNGSIPHQIHLGELHAILRRQEDFYPFLKDNREKIEKILTFRIPYYVGPLARGNSRFAWMTRKSEETITPWNFEEVVDKGASAQSFIERMTNFDKNLPNEKVLPKHSLLYEYFTVYNELTKVKYVTEGMRKPAFLSGEQKKAIVDLLFKTNRKVTVKQLKEDYFKKIECFDSVEISGVEDRFNASLGTYHDLLKIIKDKDFLDNEENEDILEDIVLTLTLFEDREMIEERLKTYAHLFDDKVMKQLKRRRYTGWGRLSRKLINGIRDKQSGKTILDFLKSDGFANRNFMQLIHDDSLTFKEDIQKAQVSGQGDSLHEHIANLAGSPAIKKGILQTVKVVDELVKVMGRHKPENIVIEMARENQTTQKGQKNSRERMKRIEEGIKELGSQILKEHPVENTQLQNEKLYLYYLQNGRDMYVDQELDINRLSDYDVDHIVPQSFLKDDSIDNKVLTRSDKARGKSDNVPSEEVVKKMKNYWRQLLNAKLITQRKFDNLTKAERGGLSELDKAGFIKRQLVETRQITKHVAQILDSRMNTKYDENDKLIREVKVITLKSKLVSDFRKDFQFYKVREINNYHHAHDAYLNAVVGTALIKKYPKLESEFVYGDYKVYDVRKMIAKSEQEIGKATAKYFFYSNIMNFFKTEITLANGEIRKRPLIETNGETGEIVWDKGRDFATVRKVLSMPQVNIVKKTEVQTGGFSKESILPKRNSDKLIARKKDWDPKKYGGFDSPTVAYSVLVVAKVEKGKSKKLKSVKELLGITIMERSSFEKNPIDFLEAKGYKEVKKDLIIKLPKYSLFELENGRKRMLASAGELQKGNELALPSKYVNFLYLASHYEKLKGSPEDNEQKQLFVEQHKHYLDEIIEQISEFSKRVILADANLDKVLSAYNKHRDKPIREQAENIIHLFTLTNLGAPAAFKYFDTTIDRKRYTSTKEVLDATLIHQSITGLYETRIDLSQLGGDGGGGSGGSGGSGGSGGSGGSGGMDDEYRLYSPLVKPDQNIQFWLEQFPQAWAETAGMGLAKQVPPQVIQLKASATPVSVRQYPLSKEAQEGIRPHVQRLIQQGILVPVQSPWNTPLLPVRKPGTNDYRPVQDLREVNKRVQDIHPTVPNPYNLLCALPPQRSWYTVLDLKDAFFCLRLHPTSQPLFAFEWRDPGTGRTGQLTWTRLPQGFKNSPTIFNEALHRDLANFRIQHPQVTLLQYVDDLLLAGATKQDCLEGTKALLLELSDLGYRASAKKAQICRREVTYLGYSLRDGQRWLTEARKKTVVQIPAPTTAKQVREFLGKAGFCRLFIPGFATLAAPLYPLTKPKGEFSWAPEHQKAFDAIKKALLSAPALALPDVTKPFTLYVDERKGVARGVLTQTLGPWRRPVAYLSKKLDPVASGWPVCLKAIAAVAILVKDADKLTLGQNITVIAPHALENIVRQPPDRWMTNARMTHYQSLLLTERVTFAPPAALNPATLLPEETDEPVTHDCHQLLIEETGVRKDLTDIPLTGEVLTWFTDGSSYVVEGKRMAGAAVVDGTRTIWASSLPEGTSAQKAELMALTQALRLAEGKSINIYTDSRYAFATAHVHGAIYKQRGWLTSAGREIKNKEEILSLLEALHLPKRLAIIHCPGHQKAKDPISRGNQMADRVAKQAAQGVNLLPAGKRTADGSEFEKRTADGSEFESPKKKAKVEGSGEGRGSLLTCGDVEENPG

SEQ ID NO: 3693 - protein, 2106 aa, synthetic construct
MPAAKRVKLDGGDKKYSIGLDIGTNSVGWAVITDEYKVPSKKFKVLGNTDRHSIKKNLIGALLFDSGETAEATRLKRTARRRYTRRKNRICYLQEIFSNEMAKVDDSFFHRLEESFLVEEDKKHERHPIFGNIVDEVAYHEKYPTIYHLRKKLVDSTDKADLRLIYLALAHMIKFRGHFLIEGDLNPDNSDVDKLFIQLVQTYNQLFEENPINASGVDAKAILSARLSKSRRLENLIAQLPGEKKNGLFGNLIALSLGLTPNFKSNFDLAEDAKLQLSKDTYDDDLDNLLAQIGDQYADLFLAAKNLSDAILLSDILRVNTEITKAPLSASMIKRYDEHHQDLTLLKALVRQQLPEKYKEIFFDQSKNGYAGYIDGGASQEEFYKFIKPILEKMDGTEELLVKLNREDLLRKQRTFDNGSIPHQIHLGELHAILRRQEDFYPFLKDNREKIEKILTFRIPYYVGPLARGNSRFAWMTRKSEETITPWNFEEVVDKGASAQSFIERMTNFDKNLPNEKVLPKHSLLYEYFTVYNELTKVKYVTEGMRKPAFLSGEQKKAIVDLLFKTNRKVTVKQLKEDYFKKIECFDSVEISGVEDRFNASLGTYHDLLKIIKDKDFLDNEENEDILEDIVLTLTLFEDREMIEERLKTYAHLFDDKVMKQLKRRRYTGWGRLSRKLINGIRDKQSGKTILDFLKSDGFANRNFMQLIHDDSLTFKEDIQKAQVSGQGDSLHEHIANLAGSPAIKKGILQTVKVVDELVKVMGRHKPENIVIEMARENQTTQKGQKNSRERMKRIEEGIKELGSQILKEHPVENTQLQNEKLYLYYLQNGRDMYVDQELDINRLSDYDVDHIVPQSFLKDDSIDNKVLTRSDKARGKSDNVPSEEVVKKMKNYWRQLLNAKLITQRKFDNLTKAERGGLSELDKAGFIKRQLVETRQITKHVAQILDSRMNTKYDENDKLIREVKVITLKSKLVSDFRKDFQFYKVREINNYHHAHDAYLNAVVGTALIKKYPKLESEFVYGDYKVYDVRKMIAKSEQEIGKATAKYFFYSNIMNFFKTEITLANGEIRKRPLIETNGETGEIVWDKGRDFATVRKVLSMPQVNIVKKTEVQTGGFSKESILPKRNSDKLIARKKDWDPKKYGGFDSPTVAYSVLVVAKVEKGKSKKLKSVKELLGITIMERSSFEKNPIDFLEAKGYKEVKKDLIIKLPKYSLFELENGRKRMLASAGELQKGNELALPSKYVNFLYLASHYEKLKGSPEDNEQKQLFVEQHKHYLDEIIEQISEFSKRVILADANLDKVLSAYNKHRDKPIREQAENIIHLFTLTNLGAPAAFKYFDTTIDRKRYTSTKEVLDATLIHQSITGLYETRIDLSQLGGDGGGGGGGSPAPGGMDDEYRLYSPLVKPDQNIQFWLEQFPQAWAETAGMGLAKQVPPQVIQLKASATPVSVRQYPLSKEAQEGIRPHVQRLIQQGILVPVQSPWNTPLLPVRKPGTNDYRPVQDLREVNKRVQDIHPTVPNPYNLLCALPPQRSWYTVLDLKDAFFCLRLHPTSQPLFAFEWRDPGTGRTGQLTWTRLPQGFKNSPTIFNEALHRDLANFRIQHPQVTLLQYVDDLLLAGATKQDCLEGTKALLLELSDLGYRASAKKAQICRREVTYLGYSLRDGQRWLTEARKKTVVQIPAPTTAKQVREFLGKAGFCRLFIPGFATLAAPLYPLTKPKGEFSWAPEHQKAFDAIKKALLSAPALALPDVTKPFTLYVDERKGVARGVLTQTLGPWRRPVAYLSKKLDPVASGWPVCLKAIAAVAILVKDADKLTLGQNITVIAPHALENIVRQPPDRWMTNARMTHYQSLLLTERVTFAPPAALNPATLLPEETDEPVTHDCHQLLIEETGVRKDLTDIPLTGEVLTWFTDGSSYVVEGKRMAGAAVVDGTRTIWASSLPEGTSAQKAELMALTQALRLAEGKSINIYTDSRYAFATAHVHGAIYKQRGWLTSAGREIKNKEEILSLLEALHLPKRLAIIHCPGHQKAKDPISRGNQMADRVAKQAAQGVNLLPAGKRTADGSEFEKRTADGSEFESPKKKAKVEGSGEGRGSLLTCGDVEENPG

SEQ ID NO: 3694 - protein, 2108 aa, synthetic construct
MPAAKRVKLDGGDKKYSIGLDIGTNSVGWAVITDEYKVPSKKFKVLGNTDRHSIKKNLIGALLFDSGETAEATRLKRTARRRYTRRKNRICYLQEIFSNEMAKVDDSFFHRLEESFLVEEDKKHERHPIFGNIVDEVAYHEKYPTIYHLRKKLVDSTDKADLRLIYLALAHMIKFRGHFLIEGDLNPDNSDVDKLFIQLVQTYNQLFEENPINASGVDAKAILSARLSKSRRLENLIAQLPGEKKNGLFGNLIALSLGLTPNFKSNFDLAEDAKLQLSKDTYDDDLDNLLAQIGDQYADLFLAAKNLSDAILLSDILRVNTEITKAPLSASMIKRYDEHHQDLTLLKALVRQQLPEKYKEIFFDQSKNGYAGYIDGGASQEEFYKFIKPILEKMDGTEELLVKLNREDLLRKQRTFDNGSIPHQIHLGELHAILRRQEDFYPFLKDNREKIEKILTFRIPYYVGPLARGNSRFAWMTRKSEETITPWNFEEVVDKGASAQSFIERMTNFDKNLPNEKVLPKHSLLYEYFTVYNELTKVKYVTEGMRKPAFLSGEQKKAIVDLLFKTNRKVTVKQLKEDYFKKIECFDSVEISGVEDRFNASLGTYHDLLKIIKDKDFLDNEENEDILEDIVLTLTLFEDREMIEERLKTYAHLFDDKVMKQLKRRRYTGWGRLSRKLINGIRDKQSGKTILDFLKSDGFANRNFMQLIHDDSLTFKEDIQKAQVSGQGDSLHEHIANLAGSPAIKKGILQTVKVVDELVKVMGRHKPENIVIEMARENQTTQKGQKNSRERMKRIEEGIKELGSQILKEHPVENTQLQNEKLYLYYLQNGRDMYVDQELDINRLSDYDVDHIVPQSFLKDDSIDNKVLTRSDKARGKSDNVPSEEVVKKMKNYWRQLLNAKLITQRKFDNLTKAERGGLSELDKAGFIKRQLVETRQITKHVAQILDSRMNTKYDENDKLIREVKVITLKSKLVSDFRKDFQFYKVREINNYHHAHDAYLNAVVGTALIKKYPKLESEFVYGDYKVYDVRKMIAKSEQEIGKATAKYFFYSNIMNFFKTEITLANGEIRKRPLIETNGETGEIVWDKGRDFATVRKVLSMPQVNIVKKTEVQTGGFSKESILPKRNSDKLIARKKDWDPKKYGGFDSPTVAYSVLVVAKVEKGKSKKLKSVKELLGITIMERSSFEKNPIDFLEAKGYKEVKKDLIIKLPKYSLFELENGRKRMLASAGELQKGNELALPSKYVNFLYLASHYEKLKGSPEDNEQKQLFVEQHKHYLDEIIEQISEFSKRVILADANLDKVLSAYNKHRDKPIREQAENIIHLFTLTNLGAPAAFKYFDTTIDRKRYTSTKEVLDATLIHQSITGLYETRIDLSQLGGDGGGSSEAAAKGGSGGMDDEYRLYSPLVKPDQNIQFWLEQFPQAWAETAGMGLAKQVPPQVIQLKASATPVSVRQYPLSKEAQEGIRPHVQRLIQQGILVPVQSPWNTPLLPVRKPGTNDYRPVQDLREVNKRVQDIHPTVPNPYNLLCALPPQRSWYTVLDLKDAFFCLRLHPTSQPLFAFEWRDPGTGRTGQLTWTRLPQGFKNSPTIFNEALHRDLANFRIQHPQVTLLQYVDDLLLAGATKQDCLEGTKALLLELSDLGYRASAKKAQICRREVTYLGYSLRDGQRWLTEARKKTVVQIPAPTTAKQVREFLGKAGFCRLFIPGFATLAAPLYPLTKPKGEFSWAPEHQKAFDAIKKALLSAPALALPDVTKPFTLYVDERKGVARGVLTQTLGPWRRPVAYLSKKLDPVASGWPVCLKAIAAVAILVKDADKLTLGQNITVIAPHALENIVRQPPDRWMTNARMTHYQSLLLTERVTFAPPAALNPATLLPEETDEPVTHDCHQLLIEETGVRKDLTDIPLTGEVLTWFTDGSSYVVEGKRMAGAAVVDGTRTIWASSLPEGTSAQKAELMALTQALRLAEGKSINIYTDSRYAFATAHVHGAIYKQRGWLTSAGREIKNKEEILSLLEALHLPKRLAIIHCPGHQKAKDPISRGNQMADRVAKQAAQGVNLLPAGKRTADGSEFEKRTADGSEFESPKKKAKVEGSGEGRGSLLTCGDVEENPG

SEQ ID NO: 3695 - protein, 2106 aa, synthetic construct
MPAAKRVKLDGGDKKYSIGLDIGTNSVGWAVITDEYKVPSKKFKVLGNTDRHSIKKNLIGALLFDSGETAEATRLKRTARRRYTRRKNRICYLQEIFSNEMAKVDDSFFHRLEESFLVEEDKKHERHPIFGNIVDEVAYHEKYPTIYHLRKKLVDSTDKADLRLIYLALAHMIKFRGHFLIEGDLNPDNSDVDKLFIQLVQTYNQLFEENPINASGVDAKAILSARLSKSRRLENLIAQLPGEKKNGLFGNLIALSLGLTPNFKSNFDLAEDAKLQLSKDTYDDDLDNLLAQIGDQYADLFLAAKNLSDAILLSDILRVNTEITKAPLSASMIKRYDEHHQDLTLLKALVRQQLPEKYKEIFFDQSKNGYAGYIDGGASQEEFYKFIKPILEKMDGTEELLVKLNREDLLRKQRTFDNGSIPHQIHLGELHAILRRQEDFYPFLKDNREKIEKILTFRIPYYVGPLARGNSRFAWMTRKSEETITPWNFEEVVDKGASAQSFIERMTNFDKNLPNEKVLPKHSLLYEYFTVYNELTKVKYVTEGMRKPAFLSGEQKKAIVDLLFKTNRKVTVKQLKEDYFKKIECFDSVEISGVEDRFNASLGTYHDLLKIIKDKDFLDNEENEDILEDIVLTLTLFEDREMIEERLKTYAHLFDDKVMKQLKRRRYTGWGRLSRKLINGIRDKQSGKTILDFLKSDGFANRNFMQLIHDDSLTFKEDIQKAQVSGQGDSLHEHIANLAGSPAIKKGILQTVKVVDELVKVMGRHKPENIVIEMARENQTTQKGQKNSRERMKRIEEGIKELGSQILKEHPVENTQLQNEKLYLYYLQNGRDMYVDQELDINRLSDYDVDHIVPQSFLKDDSIDNKVLTRSDKARGKSDNVPSEEVVKKMKNYWRQLLNAKLITQRKFDNLTKAERGGLSELDKAGFIKRQLVETRQITKHVAQILDSRMNTKYDENDKLIREVKVITLKSKLVSDFRKDFQFYKVREINNYHHAHDAYLNAVVGTALIKKYPKLESEFVYGDYKVYDVRKMIAKSEQEIGKATAKYFFYSNIMNFFKTEITLANGEIRKRPLIETNGETGEIVWDKGRDFATVRKVLSMPQVNIVKKTEVQTGGFSKESILPKRNSDKLIARKKDWDPKKYGGFDSPTVAYSVLVVAKVEKGKSKKLKSVKELLGITIMERSSFEKNPIDFLEAKGYKEVKKDLIIKLPKYSLFELENGRKRMLASAGELQKGNELALPSKYVNFLYLASHYEKLKGSPEDNEQKQLFVEQHKHYLDEIIEQISEFSKRVILADANLDKVLSAYNKHRDKPIREQAENIIHLFTLTNLGAPAAFKYFDTTIDRKRYTSTKEVLDATLIHQSITGLYETRIDLSQLGGDGGGGSGSSPAPGGMDDEYRLYSPLVKPDQNIQFWLEQFPQAWAETAGMGLAKQVPPQVIQLKASATPVSVRQYPLSKEAQEGIRPHVQRLIQQGILVPVQSPWNTPLLPVRKPGTNDYRPVQDLREVNKRVQDIHPTVPNPYNLLCALPPQRSWYTVLDLKDAFFCLRLHPTSQPLFAFEWRDPGTGRTGQLTWTRLPQGFKNSPTIFNEALHRDLANFRIQHPQVTLLQYVDDLLLAGATKQDCLEGTKALLLELSDLGYRASAKKAQICRREVTYLGYSLRDGQRWLTEARKKTVVQIPAPTTAKQVREFLGKAGFCRLFIPGFATLAAPLYPLTKPKGEFSWAPEHQKAFDAIKKALLSAPALALPDVTKPFTLYVDERKGVARGVLTQTLGPWRRPVAYLSKKLDPVASGWPVCLKAIAAVAILVKDADKLTLGQNITVIAPHALENIVRQPPDRWMTNARMTHYQSLLLTERVTFAPPAALNPATLLPEETDEPVTHDCHQLLIEETGVRKDLTDIPLTGEVLTWFTDGSSYVVEGKRMAGAAVVDGTRTIWASSLPEGTSAQKAELMALTQALRLAEGKSINIYTDSRYAFATAHVHGAIYKQRGWLTSAGREIKNKEEILSLLEALHLPKRLAIIHCPGHQKAKDPISRGNQMADRVAKQAAQGVNLLPAGKRTADGSEFEKRTADGSEFESPKKKAKVEGSGEGRGSLLTCGDVEENPG

SEQ ID NO: 3696 - protein, 2108 aa, synthetic construct
MPAAKRVKLDGGDKKYSIGLDIGTNSVGWAVITDEYKVPSKKFKVLGNTDRHSIKKNLIGALLFDSGETAEATRLKRTARRRYTRRKNRICYLQEIFSNEMAKVDDSFFHRLEESFLVEEDKKHERHPIFGNIVDEVAYHEKYPTIYHLRKKLVDSTDKADLRLIYLALAHMIKFRGHFLIEGDLNPDNSDVDKLFIQLVQTYNQLFEENPINASGVDAKAILSARLSKSRRLENLIAQLPGEKKNGLFGNLIALSLGLTPNFKSNFDLAEDAKLQLSKDTYDDDLDNLLAQIGDQYADLFLAAKNLSDAILLSDILRVNTEITKAPLSASMIKRYDEHHQDLTLLKALVRQQLPEKYKEIFFDQSKNGYAGYIDGGASQEEFYKFIKPILEKMDGTEELLVKLNREDLLRKQRTFDNGSIPHQIHLGELHAILRRQEDFYPFLKDNREKIEKILTFRIPYYVGPLARGNSRFAWMTRKSEETITPWNFEEVVDKGASAQSFIERMTNFDKNLPNEKVLPKHSLLYEYFTVYNELTKVKYVTEGMRKPAFLSGEQKKAIVDLLFKTNRKVTVKQLKEDYFKKIECFDSVEISGVEDRFNASLGTYHDLLKIIKDKDFLDNEENEDILEDIVLTLTLFEDREMIEERLKTYAHLFDDKVMKQLKRRRYTGWGRLSRKLINGIRDKQSGKTILDFLKSDGFANRNFMQLIHDDSLTFKEDIQKAQVSGQGDSLHEHIANLAGSPAIKKGILQTVKVVDELVKVMGRHKPENIVIEMARENQTTQKGQKNSRERMKRIEEGIKELGSQILKEHPVENTQLQNEKLYLYYLQNGRDMYVDQELDINRLSDYDVDHIVPQSFLKDDSIDNKVLTRSDKARGKSDNVPSEEVVKKMKNYWRQLLNAKLITQRKFDNLTKAERGGLSELDKAGFIKRQLVETRQITKHVAQILDSRMNTKYDENDKLIREVKVITLKSKLVSDFRKDFQFYKVREINNYHHAHDAYLNAVVGTALIKKYPKLESEFVYGDYKVYDVRKMIAKSEQEIGKATAKYFFYSNIMNFFKTEITLANGEIRKRPLIETNGETGEIVWDKGRDFATVRKVLSMPQVNIVKKTEVQTGGFSKESILPKRNSDKLIARKKDWDPKKYGGFDSPTVAYSVLVVAKVEKGKSKKLKSVKELLGITIMERSSFEKNPIDFLEAKGYKEVKKDLIIKLPKYSLFELENGRKRMLASAGELQKGNELALPSKYVNFLYLASHYEKLKGSPEDNEQKQLFVEQHKHYLDEIIEQISEFSKRVILADANLDKVLSAYNKHRDKPIREQAENIIHLFTLTNLGAPAAFKYFDTTIDRKRYTSTKEVLDATLIHQSITGLYETRIDLSQLGGDGGGSSGGGEAAAKGGMDDEYRLYSPLVKPDQNIQFWLEQFPQAWAETAGMGLAKQVPPQVIQLKASATPVSVRQYPLSKEAQEGIRPHVQRLIQQGILVPVQSPWNTPLLPVRKPGTNDYRPVQDLREVNKRVQDIHPTVPNPYNLLCALPPQRSWYTVLDLKDAFFCLRLHPTSQPLFAFEWRDPGTGRTGQLTWTRLPQGFKNSPTIFNEALHRDLANFRIQHPQVTLLQYVDDLLLAGATKQDCLEGTKALLLELSDLGYRASAKKAQICRREVTYLGYSLRDGQRWLTEARKKTVVQIPAPTTAKQVREFLGKAGFCRLFIPGFATLAAPLYPLTKPKGEFSWAPEHQKAFDAIKKALLSAPALALPDVTKPFTLYVDERKGVARGVLTQTLGPWRRPVAYLSKKLDPVASGWPVCLKAIAAVAILVKDADKLTLGQNITVIAPHALENIVRQPPDRWMTNARMTHYQSLLLTERVTFAPPAALNPATLLPEETDEPVTHDCHQLLIEETGVRKDLTDIPLTGEVLTWFTDGSSYVVEGKRMAGAAVVDGTRTIWASSLPEGTSAQKAELMALTQALRLAEGKSINIYTDSRYAFATAHVHGAIYKQRGWLTSAGREIKNKEEILSLLEALHLPKRLAIIHCPGHQKAKDPISRGNQMADRVAKQAAQGVNLLPAGKRTADGSEFEKRTADGSEFESPKKKAKVEGSGEGRGSLLTCGDVEENPG

SEQ ID NO: 3697 - protein, 2143 aa, synthetic construct
MPAAKRVKLDGGDKKYSIGLDIGTNSVGWAVITDEYKVPSKKFKVLGNTDRHSIKKNLIGALLFDSGETAEATRLKRTARRRYTRRKNRICYLQEIFSNEMAKVDDSFFHRLEESFLVEEDKKHERHPIFGNIVDEVAYHEKYPTIYHLRKKLVDSTDKADLRLIYLALAHMIKFRGHFLIEGDLNPDNSDVDKLFIQLVQTYNQLFEENPINASGVDAKAILSARLSKSRRLENLIAQLPGEKKNGLFGNLIALSLGLTPNFKSNFDLAEDAKLQLSKDTYDDDLDNLLAQIGDQYADLFLAAKNLSDAILLSDILRVNTEITKAPLSASMIKRYDEHHQDLTLLKALVRQQLPEKYKEIFFDQSKNGYAGYIDGGASQEEFYKFIKPILEKMDGTEELLVKLNREDLLRKQRTFDNGSIPHQIHLGELHAILRRQEDFYPFLKDNREKIEKILTFRIPYYVGPLARGNSRFAWMTRKSEETITPWNFEEVVDKGASAQSFIERMTNFDKNLPNEKVLPKHSLLYEYFTVYNELTKVKYVTEGMRKPAFLSGEQKKAIVDLLFKTNRKVTVKQLKEDYFKKIECFDSVEISGVEDRFNASLGTYHDLLKIIKDKDFLDNEENEDILEDIVLTLTLFEDREMIEERLKTYAHLFDDKVMKQLKRRRYTGWGRLSRKLINGIRDKQSGKTILDFLKSDGFANRNFMQLIHDDSLTFKEDIQKAQVSGQGDSLHEHIANLAGSPAIKKGILQTVKVVDELVKVMGRHKPENIVIEMARENQTTQKGQKNSRERMKRIEEGIKELGSQILKEHPVENTQLQNEKLYLYYLQNGRDMYVDQELDINRLSDYDVDHIVPQSFLKDDSIDNKVLTRSDKARGKSDNVPSEEVVKKMKNYWRQLLNAKLITQRKFDNLTKAERGGLSELDKAGFIKRQLVETRQITKHVAQILDSRMNTKYDENDKLIREVKVITLKSKLVSDFRKDFQFYKVREINNYHHAHDAYLNAVVGTALIKKYPKLESEFVYGDYKVYDVRKMIAKSEQEIGKATAKYFFYSNIMNFFKTEITLANGEIRKRPLIETNGETGEIVWDKGRDFATVRKVLSMPQVNIVKKTEVQTGGFSKESILPKRNSDKLIARKKDWDPKKYGGFDSPTVAYSVLVVAKVEKGKSKKLKSVKELLGITIMERSSFEKNPIDFLEAKGYKEVKKDLIIKLPKYSLFELENGRKRMLASAGELQKGNELALPSKYVNFLYLASHYEKLKGSPEDNEQKQLFVEQHKHYLDEIIEQISEFSKRVILADANLDKVLSAYNKHRDKPIREQAENIIHLFTLTNLGAPAAFKYFDTTIDRKRYTSTKEVLDATLIHQSITGLYETRIDLSQLGGDGGAEAAAKEAAAKEAAAKEAAAKALEAEAAAKEAAAKEAAAKEAAAKAGGMDDEYRLYSPLVKPDQNIQFWLEQFPQAWAETAGMGLAKQVPPQVIQLKASATPVSVRQYPLSKEAQEGIRPHVQRLIQQGILVPVQSPWNTPLLPVRKPGTNDYRPVQDLREVNKRVQDIHPTVPNPYNLLCALPPQRSWYTVLDLKDAFFCLRLHPTSQPLFAFEWRDPGTGRTGQLTWTRLPQGFKNSPTIFNEALHRDLANFRIQHPQVTLLQYVDDLLLAGATKQDCLEGTKALLLELSDLGYRASAKKAQICRREVTYLGYSLRDGQRWLTEARKKTVVQIPAPTTAKQVREFLGKAGFCRLFIPGFATLAAPLYPLTKPKGEFSWAPEHQKAFDAIKKALLSAPALALPDVTKPFTLYVDERKGVARGVLTQTLGPWRRPVAYLSKKLDPVASGWPVCLKAIAAVAILVKDADKLTLGQNITVIAPHALENIVRQPPDRWMTNARMTHYQSLLLTERVTFAPPAALNPATLLPEETDEPVTHDCHQLLIEETGVRKDLTDIPLTGEVLTWFTDGSSYVVEGKRMAGAAVVDGTRTIWASSLPEGTSAQKAELMALTQALRLAEGKSINIYTDSRYAFATAHVHGAIYKQRGWLTSAGREIKNKEEILSLLEALHLPKRLAIIHCPGHQKAKDPISRGNQMADRVAKQAAQGVNLLPAGKRTADGSEFEKRTADGSEFESPKKKAKVEGSGEGRGSLLTCGDVEENPG

SEQ ID NO: 3698 - protein, 2108 aa, synthetic construct; identical to SEQ ID NO: 3563

SEQ ID NO: 3699 - protein, 2131 aa, synthetic construct
MKRTADGSEFESPKKKRKVDKKYSIGLDIGTNSVGWAVITDEYKVPSKKFKVLGNTDRHSIKKNLIGALLFDSGETAEATRLKRTARRRYTRRKNRICYLQEIFSNEMAKVDDSFFHRLEESFLVEEDKKHERHPIFGNIVDEVAYHEKYPTIYHLRKKLVDSTDKADLRLIYLALAHMIKFRGHFLIEGDLNPDNSDVDKLFIQLVQTYNQLFEENPINASGVDAKAILSARLSKSRRLENLIAQLPGEKKNGLFGNLIALSLGLTPNFKSNFDLAEDAKLQLSKDTYDDDLDNLLAQIGDQYADLFLAAKNLSDAILLSDILRVNTEITKAPLSASMIKRYDEHHQDLTLLKALVRQQLPEKYKEIFFDQSKNGYAGYIDGGASQEEFYKFIKPILEKMDGTEELLVKLNREDLLRKQRTFDNGSIPHQIHLGELHAILRRQEDFYPFLKDNREKIEKILTFRIPYYVGPLARGNSRFAWMTRKSEETITPWNFEEVVDKGASAQSFIERMTNFDKNLPNEKVLPKHSLLYEYFTVYNELTKVKYVTEGMRKPAFLSGEQKKAIVDLLFKTNRKVTVKQLKEDYFKKIECFDSVEISGVEDRFNASLGTYHDLLKIIKDKDFLDNEENEDILEDIVLTLTLFEDREMIEERLKTYAHLFDDKVMKQLKRRRYTGWGRLSRKLINGIRDKQSGKTILDFLKSDGFANRNFMQLIHDDSLTFKEDIQKAQVSGQGDSLHEHIANLAGSPAIKKGILQTVKVVDELVKVMGRHKPENIVIEMARENQTTQKGQKNSRERMKRIEEGIKELGSQILKEHPVENTQLQNEKLYLYYLQNGRDMYVDQELDINRLSDYDVDHIVPQSFLKDDSIDNKVLTRSDKARGKSDNVPSEEVVKKMKNYWRQLLNAKLITQRKFDNLTKAERGGLSELDKAGFIKRQLVETRQITKHVAQILDSRMNTKYDENDKLIREVKVITLKSKLVSDFRKDFQFYKVREINNYHHAHDAYLNAVVGTALIKKYPKLESEFVYGDYKVYDVRKMIAKSEQEIGKATAKYFFYSNIMNFFKTEITLANGEIRKRPLIETNGETGEIVWDKGRDFATVRKVLSMPQVNIVKKTEVQTGGFSKESILPKRNSDKLIARKKDWDPKKYGGFDSPTVAYSVLVVAKVEKGKSKKLKSVKELLGITIMERSSFEKNPIDFLEAKGYKEVKKDLIIKLPKYSLFELENGRKRMLASAGELQKGNELALPSKYVNFLYLASHYEKLKGSPEDNEQKQLFVEQHKHYLDEIIEQISEFSKRVILADANLDKVLSAYNKHRDKPIREQAENIIHLFTLTNLGAPAAFKYFDTTIDRKRYTSTKEVLDATLIHQSITGLYETRIDLSQLGGDSGGSSGGSSGSETPGTSESATPESSGGSSGGSSVQEISDSRPMLHIYLNGRRFLGLLDTGADKTCIAGRDWPANWPIHQTESSLQGLGMACGVARSSQPLRWQHEDKSGIIHPFVIPTLPFTLWGRDIMKDIKVRLMTDSPDDSQDLMIGAIESNLFADQISWKSDQPVWLNQWPLKQEKLQALQQLVTEQLQLGHLEESNSPWNTPVFVIKKKSGKWRLLQDLRAVNATMHDMGALQPGLPSPVAVPKGWEIIIIDLQDCFFNIKLHPEDCKRFAFSVPSPNFKRPYQRFQWKVLPQGMKNSPTLCQKFVDKAILTVRDKYQDSYIVHYMDDILLAHPSRSIVDEILTSMIQALNKHGLVVSTEKIQKYDNLKYLGTHIQGDSVSYQKLQIRTDKLRTLNDFQKLLGNINWIRPFLKLTTGELKPLFEILNGDSNPISTRKLTPEACKALQLMNERLSTARVKRLDLSQPWSLCILKTEYTPTACLWQDGVVEWIHLPHISPKVITPYDIFCTQLIIKGRHRSKELFSKDPDYIVVPYTKVQFDLLLQEKEDWPISLLGFLGEVHFHLPKDPLLTFTLQTAIIFPHMTSTTPLEKGIVIFTDGSANGRSVTYIQGREPIIKENTQNTAQQAEIVAVITAFEEVSQPFNLYTDSKYVTGLFPEIETATLSPRTKIYTELKHLQRLIHKRQEKFYIGHIRGHTGLPGPLAQGNAYADSLTRILTASGGSKRTADGSEFEPKKKRKV

SEQ ID NO: 3700 - protein, 2136 aa, synthetic construct
MPAAKRVKLDGGDKKYSIGLDIGTNSVGWAVITDEYKVPSKKFKVLGNTDRHSIKKNLIGALLFDSGETAEATRLKRTARRRYTRRKNRICYLQEIFSNEMAKVDDSFFHRLEESFLVEEDKKHERHPIFGNIVDEVAYHEKYPTIYHLRKKLVDSTDKADLRLIYLALAHMIKFRGHFLIEGDLNPDNSDVDKLFIQLVQTYNQLFEENPINASGVDAKAILSARLSKSRRLENLIAQLPGEKKNGLFGNLIALSLGLTPNFKSNFDLAEDAKLQLSKDTYDDDLDNLLAQIGDQYADLFLAAKNLSDAILLSDILRVNTEITKAPLSASMIKRYDEHHQDLTLLKALVRQQLPEKYKEIFFDQSKNGYAGYIDGGASQEEFYKFIKPILEKMDGTEELLVKLNREDLLRKQRTFDNGSIPHQIHLGELHAILRRQEDFYPFLKDNREKIEKILTFRIPYYVGPLARGNSRFAWMTRKSEETITPWNFEEVVDKGASAQSFIERMTNFDKNLPNEKVLPKHSLLYEYFTVYNELTKVKYVTEGMRKPAFLSGEQKKAIVDLLFKTNRKVTVKQLKEDYFKKIECFDSVEISGVEDRFNASLGTYHDLLKIIKDKDFLDNEENEDILEDIVLTLTLFEDREMIEERLKTYAHLFDDKVMKQLKRRRYTGWGRLSRKLINGIRDKQSGKTILDFLKSDGFANRNFMQLIHDDSLTFKEDIQKAQVSGQGDSLHEHIANLAGSPAIKKGILQTVKVVDELVKVMGRHKPENIVIEMARENQTTQKGQKNSRERMKRIEEGIKELGSQILKEHPVENTQLQNEKLYLYYLQNGRDMYVDQELDINRLSDYDVDHIVPQSFLKDDSIDNKVLTRSDKARGKSDNVPSEEVVKKMKNYWRQLLNAKLITQRKFDNLTKAERGGLSELDKAGFIKRQLVETRQITKHVAQILDSRMNTKYDENDKLIREVKVITLKSKLVSDFRKDFQFYKVREINNYHHAHDAYLNAVVGTALIKKYPKLESEFVYGDYKVYDVRKMIAKSEQEIGKATAKYFFYSNIMNFFKTEITLANGEIRKRPLIETNGETGEIVWDKGRDFATVRKVLSMPQVNIVKKTEVQTGGFSKESILPKRNSDKLIARKKDWDPKKYGGFDSPTVAYSVLVVAKVEKGKSKKLKSVKELLGITIMERSSFEKNPIDFLEAKGYKEVKKDLIIKLPKYSLFELENGRKRMLASAGELQKGNELALPSKYVNFLYLASHYEKLKGSPEDNEQKQLFVEQHKHYLDEIIEQISEFSKRVILADANLDKVLSAYNKHRDKPIREQAENIIHLFTLTNLGAPAAFKYFDTTIDRKRYTSTKEVLDATLIHQSITGLYETRIDLSQLGGDSGGSSGGSSGSETPGTSESATPESSGGSSGGSSVQEISDSRPMLHIYLNGRRFLGLLDTGADKTCIAGRDWPANWPIHQTESSLQGLGMACGVARSSQPLRWQHEDKSGIIHPFVIPTLPFTLWGRDIMKDIKVRLMTDSPDDSQDLMIGAIESNLFADQISWKSDQPVWLNQWPLKQEKLQALQQLVTEQLQLGHLEESNSPWNTPVFVIKKKSGKWRLLQDLRAVNATMHDMGALQPGLPSPVAVPKGWEIIIIDLQDCFFNIKLHPEDCKRFAFSVPSPNFKRPYQRFQWKVLPQGMKNSPTLCQKFVDKAILTVRDKYQDSYIVHYMDDILLAHPSRSIVDEILTSMIQALNKHGLVVSTEKIQKYDNLKYLGTHIQGDSVSYQKLQIRTDKLRTLNDFQKLLGNINWIRPFLKLTTGELKPLFEILNGDSNPISTRKLTPEACKALQLMNERLSTARVKRLDLSQPWSLCILKTEYTPTACLWQDGVVEWIHLPHISPKVITPYDIFCTQLIIKGRHRSKELFSKDPDYIVVPYTKVQFDLLLQEKEDWPISLLGFLGEVHFHLPKDPLLTFTLQTAIIFPHMTSTTPLEKGIVIFTDGSANGRSVTYIQGREPIIKENTQNTAQQAEIVAVITAFEEVSQPFNLYTDSKYVTGLFPEIETATLSPRTKIYTELKHLQRLIHKRQEKFYIGHIRGHTGLPGPLAQGNAYADSLTRILTASGGSKRTADGSEFEKRTADGSEFESPKKKAKVE

SEQ ID NO: 3701 - protein, 2158 aa, synthetic construct
MPAAKRVKLDGGDKKYSIGLDIGTNSVGWAVITDEYKVPSKKFKVLGNTDRHSIKKNLIGALLFDSGETAEATRLKRTARRRYTRRKNRICYLQEIFSNEMAKVDDSFFHRLEESFLVEEDKKHERHPIFGNIVDEVAYHEKYPTIYHLRKKLVDSTDKADLRLIYLALAHMIKFRGHFLIEGDLNPDNSDVDKLFIQLVQTYNQLFEENPINASGVDAKAILSARLSKSRRLENLIAQLPGEKKNGLFGNLIALSLGLTPNFKSNFDLAEDAKLQLSKDTYDDDLDNLLAQIGDQYADLFLAAKNLSDAILLSDILRVNTEITKAPLSASMIKRYDEHHQDLTLLKALVRQQLPEKYKEIFFDQSKNGYAGYIDGGASQEEFYKFIKPILEKMDGTEELLVKLNREDLLRKQRTFDNGSIPHQIHLGELHAILRRQEDFYPFLKDNREKIEKILTFRIPYYVGPLARGNSRFAWMTRKSEETITPWNFEEVVDKGASAQSFIERMTNFDKNLPNEKVLPKHSLLYEYFTVYNELTKVKYVTEGMRKPAFLSGEQKKAIVDLLFKTNRKVTVKQLKEDYFKKIECFDSVEISGVEDRFNASLGTYHDLLKIIKDKDFLDNEENEDILEDIVLTLTLFEDREMIEERLKTYAHLFDDKVMKQLKRRRYTGWGRLSRKLINGIRDKQSGKTILDFLKSDGFANRNFMQLIHDDSLTFKEDIQKAQVSGQGDSLHEHIANLAGSPAIKKGILQTVKVVDELVKVMGRHKPENIVIEMARENQTTQKGQKNSRERMKRIEEGIKELGSQILKEHPVENTQLQNEKLYLYYLQNGRDMYVDQELDINRLSDYDVDHIVPQSFLKDDSIDNKVLTRSDKARGKSDNVPSEEVVKKMKNYWRQLLNAKLITQRKFDNLTKAERGGLSELDKAGFIKRQLVETRQITKHVAQILDSRMNTKYDENDKLIREVKVITLKSKLVSDFRKDFQFYKVREINNYHHAHDAYLNAVVGTALIKKYPKLESEFVYGDYKVYDVRKMIAKSEQEIGKATAKYFFYSNIMNFFKTEITLANGEIRKRPLIETNGETGEIVWDKGRDFATVRKVLSMPQVNIVKKTEVQTGGFSKESILPKRNSDKLIARKKDWDPKKYGGFDSPTVAYSVLVVAKVEKGKSKKLKSVKELLGITIMERSSFEKNPIDFLEAKGYKEVKKDLIIKLPKYSLFELENGRKRMLASAGELQKGNELALPSKYVNFLYLASHYEKLKGSPEDNEQKQLFVEQHKHYLDEIIEQISEFSKRVILADANLDKVLSAYNKHRDKPIREQAENIIHLFTLTNLGAPAAFKYFDTTIDRKRYTSTKEVLDATLIHQSITGLYETRIDLSQLGGDGGSGGSSGGSSGSETPGTSESATPESSGGSSGGSSGGVQEISDSRPMLHIYLNGRRFLGLLDTGADKTCIAGRDWPANWPIHQTESSLQGLGMACGVARSSQPLRWQHEDKSGIIHPFVIPTLPFTLWGRDIMKDIKVRLMTDSPDDSQDLMIGAIESNLFADQISWKSDQPVWLNQWPLKQEKLQALQQLVTEQLQLGHLEESNSPWNTPVFVIKKKSGKWRLLQDLRAVNATMHDMGALQPGLPSPVAVPKGWEIIIIDLQDCFFNIKLHPEDCKRFAFSVPSPNFKRPYQRFQWKVLPQGMKNSPTLCQKFVDKAILTVRDKYQDSYIVHYMDDILLAHPSRSIVDEILTSMIQALNKHGLVVSTEKIQKYDNLKYLGTHIQGDSVSYQKLQIRTDKLRTLNDFQKLLGNINWIRPFLKLTTGELKPLFEILNGDSNPISTRKLTPEACKALQLMNERLSTARVKRLDLSQPWSLCILKTEYTPTACLWQDGVVEWIHLPHISPKVITPYDIFCTQLIIKGRHRSKELFSKDPDYIVVPYTKVQFDLLLQEKEDWPISLLGFLGEVHFHLPKDPLLTFTLQTAIIFPHMTSTTPLEKGIVIFTDGSANGRSVTYIQGREPIIKENTQNTAQQAEIVAVITAFEEVSQPFNLYTDSKYVTGLFPEIETATLSPRTKIYTELKHLQRLIHKRQEKFYIGHIRGHTGLPGPLAQGNAYADSLTRILTAAGKRTADGSEFEKRTADGSEFESPKKKAKVEGSGEGRGSLLTCGDVEENPG

SEQ ID NO: 3702 - protein, 2140 aa, synthetic construct
MPAAKRVKLDGGDKKYSIGLDIGTNSVGWAVITDEYKVPSKKFKVLGNTDRHSIKKNLIGALLFDSGETAEATRLKRTARRRYTRRKNRICYLQEIFSNEMAKVDDSFFHRLEESFLVEEDKKHERHPIFGNIVDEVAYHEKYPTIYHLRKKLVDSTDKADLRLIYLALAHMIKFRGHFLIEGDLNPDNSDVDKLFIQLVQTYNQLFEENPINASGVDAKAILSARLSKSRRLENLIAQLPGEKKNGLFGNLIALSLGLTPNFKSNFDLAEDAKLQLSKDTYDDDLDNLLAQIGDQYADLFLAAKNLSDAILLSDILRVNTEITKAPLSASMIKRYDEHHQDLTLLKALVRQQLPEKYKEIFFDQSKNGYAGYIDGGASQEEFYKFIKPILEKMDGTEELLVKLNREDLLRKQRTFDNGSIPHQIHLGELHAILRRQEDFYPFLKDNREKIEKILTFRIPYYVGPLARGNSRFAWMTRKSEETITPWNFEEVVDKGASAQSFIERMTNFDKNLPNEKVLPKHSLLYEYFTVYNELTKVKYVTEGMRKPAFLSGEQKKAIVDLLFKTNRKVTVKQLKEDYFKKIECFDSVEISGVEDRFNASLGTYHDLLKIIKDKDFLDNEENEDILEDIVLTLTLFEDREMIEERLKTYAHLFDDKVMKQLKRRRYTGWGRLSRKLINGIRDKQSGKTILDFLKSDGFANRNFMQLIHDDSLTFKEDIQKAQVSGQGDSLHEHIANLAGSPAIKKGILQTVKVVDELVKVMGRHKPENIVIEMARENQTTQKGQKNSRERMKRIEEGIKELGSQILKEHPVENTQLQNEKLYLYYLQNGRDMYVDQELDINRLSDYDVDHIVPQSFLKDDSIDNKVLTRSDKARGKSDNVPSEEVVKKMKNYWRQLLNAKLITQRKFDNLTKAERGGLSELDKAGFIKRQLVETRQITKHVAQILDSRMNTKYDENDKLIREVKVITLKSKLVSDFRKDFQFYKVREINNYHHAHDAYLNAVVGTALIKKYPKLESEFVYGDYKVYDVRKMIAKSEQEIGKATAKYFFYSNIMNFFKTEITLANGEIRKRPLIETNGETGEIVWDKGRDFATVRKVLSMPQVNIVKKTEVQTGGFSKESILPKRNSDKLIARKKDWDPKKYGGFDSPTVAYSVLVVAKVEKGKSKKLKSVKELLGITIMERSSFEKNPIDFLEAKGYKEVKKDLIIKLPKYSLFELENGRKRMLASAGELQKGNELALPSKYVNFLYLASHYEKLKGSPEDNEQKQLFVEQHKHYLDEIIEQISEFSKRVILADANLDKVLSAYNKHRDKPIREQAENIIHLFTLTNLGAPAAFKYFDTTIDRKRYTSTKEVLDATLIHQSITGLYETRIDLSQLGGDGGGSSGSSGSSGSSGSSGGVQEISDSRPMLHIYLNGRRFLGLLDTGADKTCIAGRDWPANWPIHQTESSLQGLGMACGVARSSQPLRWQHEDKSGIIHPFVIPTLPFTLWGRDIMKDIKVRLMTDSPDDSQDLMIGAIESNLFADQISWKSDQPVWLNQWPLKQEKLQALQQLVTEQLQLGHLEESNSPWNTPVFVIKKKSGKWRLLQDLRAVNATMHDMGALQPGLPSPVAVPKGWEIIIIDLQDCFFNIKLHPEDCKRFAFSVPSPNFKRPYQRFQWKVLPQGMKNSPTLCQKFVDKAILTVRDKYQDSYIVHYMDDILLAHPSRSIVDEILTSMIQALNKHGLVVSTEKIQKYDNLKYLGTHIQGDSVSYQKLQIRTDKLRTLNDFQKLLGNINWIRPFLKLTTGELKPLFEILNGDSNPISTRKLTPEACKALQLMNERLSTARVKRLDLSQPWSLCILKTEYTPTACLWQDGVVEWIHLPHISPKVITPYDIFCTQLIIKGRHRSKELFSKDPDYIVVPYTKVQFDLLLQEKEDWPISLLGFLGEVHFHLPKDPLLTFTLQTAIIFPHMTSTTPLEKGIVIFTDGSANGRSVTYIQGREPIIKENTQNTAQQAEIVAVITAFEEVSQPFNLYTDSKYVTGLFPEIETATLSPRTKIYTELKHLQRLIHKRQEKFYIGHIRGHTGLPGPLAQGNAYADSLTRILTAAGKRTADGSEFEKRTADGSEFESPKKKAKVEGSGEGRGSLLTCGDVEENPG

SEQ ID NO: 3703 - protein, 2134 aa, synthetic construct
MPAAKRVKLDGGDKKYSIGLDIGTNSVGWAVITDEYKVPSKKFKVLGNTDRHSIKKNLIGALLFDSGETAEATRLKRTARRRYTRRKNRICYLQEIFSNEMAKVDDSFFHRLEESFLVEEDKKHERHPIFGNIVDEVAYHEKYPTIYHLRKKLVDSTDKADLRLIYLALAHMIKFRGHFLIEGDLNPDNSDVDKLFIQLVQTYNQLFEENPINASGVDAKAILSARLSKSRRLENLIAQLPGEKKNGLFGNLIALSLGLTPNFKSNFDLAEDAKLQLSKDTYDDDLDNLLAQIGDQYADLFLAAKNLSDAILLSDILRVNTEITKAPLSASMIKRYDEHHQDLTLLKALVRQQLPEKYKEIFFDQSKNGYAGYIDGGASQEEFYKFIKPILEKMDGTEELLVKLNREDLLRKQRTFDNGSIPHQIHLGELHAILRRQEDFYPFLKDNREKIEKILTFRIPYYVGPLARGNSRFAWMTRKSEETITPWNFEEVVDKGASAQSFIERMTNFDKNLPNEKVLPKHSLLYEYFTVYNELTKVKYVTEGMRKPAFLSGEQKKAIVDLLFKTNRKVTVKQLKEDYFKKIECFDSVEISGVEDRFNASLGTYHDLLKIIKDKDFLDNEENEDILEDIVLTLTLFEDREMIEERLKTYAHLFDDKVMKQLKRRRYTGWGRLSRKLINGIRDKQSGKTILDFLKSDGFANRNFMQLIHDDSLTFKEDIQKAQVSGQGDSLHEHIANLAGSPAIKKGILQTVKVVDELVKVMGRHKPENIVIEMARENQTTQKGQKNSRERMKRIEEGIKELGSQILKEHPVENTQLQNEKLYLYYLQNGRDMYVDQELDINRLSDYDVDHIVPQSFLKDDSIDNKVLTRSDKARGKSDNVPSEEVVKKMKNYWRQLLNAKLITQRKFDNLTKAERGGLSELDKAGFIKRQLVETRQITKHVAQILDSRMNTKYDENDKLIREVKVITLKSKLVSDFRKDFQFYKVREINNYHHAHDAYLNAVVGTALIKKYPKLESEFVYGDYKVYDVRKMIAKSEQEIGKATAKYFFYSNIMNFFKTEITLANGEIRKRPLIETNGETGEIVWDKGRDFATVRKVLSMPQVNIVKKTEVQTGGFSKESILPKRNSDKLIARKKDWDPKKYGGFDSPTVAYSVLVVAKVEKGKSKKLKSVKELLGITIMERSSFEKNPIDFLEAKGYKEVKKDLIIKLPKYSLFELENGRKRMLASAGELQKGNELALPSKYVNFLYLASHYEKLKGSPEDNEQKQLFVEQHKHYLDEIIEQISEFSKRVILADANLDKVLSAYNKHRDKPIREQAENIIHLFTLTNLGAPAAFKYFDTTIDRKRYTSTKEVLDATLIHQSITGLYETRIDLSQLGGDGGPAPAPAPAPGGVQEISDSRPMLHIYLNGRRFLGLLDTGADKTCIAGRDWPANWPIHQTESSLQGLGMACGVARSSQPLRWQHEDKSGIIHPFVIPTLPFTLWGRDIMKDIKVRLMTDSPDDSQDLMIGAIESNLFADQISWKSDQPVWLNQWPLKQEKLQALQQLVTEQLQLGHLEESNSPWNTPVFVIKKKSGKWRLLQDLRAVNATMHDMGALQPGLPSPVAVPKGWEIIIIDLQDCFFNIKLHPEDCKRFAFSVPSPNFKRPYQRFQWKVLPQGMKNSPTLCQKFVDKAILTVRDKYQDSYIVHYMDDILLAHPSRSIVDEILTSMIQALNKHGLVVSTEKIQKYDNLKYLGTHIQGDSVSYQKLQIRTDKLRTLNDFQKLLGNINWIRPFLKLTTGELKPLFEILNGDSNPISTRKLTPEACKALQLMNERLSTARVKRLDLSQPWSLCILKTEYTPTACLWQDGVVEWIHLPHISPKVITPYDIFCTQLIIKGRHRSKELFSKDPDYIVVPYTKVQFDLLLQEKEDWPISLLGFLGEVHFHLPKDPLLTFTLQTAIIFPHMTSTTPLEKGIVIFTDGSANGRSVTYIQGREPIIKENTQNTAQQAEIVAVITAFEEVSQPFNLYTDSKYVTGLFPEIETATLSPRTKIYTELKHLQRLIHKRQEKFYIGHIRGHTGLPGPLAQGNAYADSLTRILTAAGKRTADGSEFEKRTADGSEFESPKKKAKVEGSGEGRGSLLTCGDVEENPG

SEQ ID NO: 3704 - protein, 2134 aa, synthetic construct
MPAAKRVKLDGGDKKYSIGLDIGTNSVGWAVITDEYKVPSKKFKVLGNTDRHSIKKNLIGALLFDSGETAEATRLKRTARRRYTRRKNRICYLQEIFSNEMAKVDDSFFHRLEESFLVEEDKKHERHPIFGNIVDEVAYHEKYPTIYHLRKKLVDSTDKADLRLIYLALAHMIKFRGHFLIEGDLNPDNSDVDKLFIQLVQTYNQLFEENPINASGVDAKAILSARLSKSRRLENLIAQLPGEKKNGLFGNLIALSLGLTPNFKSNFDLAEDAKLQLSKDTYDDDLDNLLAQIGDQYADLFLAAKNLSDAILLSDILRVNTEITKAPLSASMIKRYDEHHQDLTLLKALVRQQLPEKYKEIFFDQSKNGYAGYIDGGASQEEFYKFIKPILEKMDGTEELLVKLNREDLLRKQRTFDNGSIPHQIHLGELHAILRRQEDFYPFLKDNREKIEKILTFRIPYYVGPLARGNSRFAWMTRKSEETITPWNFEEVVDKGASAQSFIERMTNFDKNLPNEKVLPKHSLLYEYFTVYNELTKVKYVTEGMRKPAFLSGEQKKAIVDLLFKTNRKVTVKQLKEDYFKKIECFDSVEISGVEDRFNASLGTYHDLLKIIKDKDFLDNEENEDILEDIVLTLTLFEDREMIEERLKTYAHLFDDKVMKQLKRRRYTGWGRLSRKLINGIRDKQSGKTILDFLKSDGFANRNFMQLIHDDSLTFKEDIQKAQVSGQGDSLHEHIANLAGSPAIKKGILQTVKVVDELVKVMGRHKPENIVIEMARENQTTQKGQKNSRERMKRIEEGIKELGSQILKEHPVENTQLQNEKLYLYYLQNGRDMYVDQELDINRLSDYDVDHIVPQSFLKDDSIDNKVLTRSDKARGKSDNVPSEEVVKKMKNYWRQLLNAKLITQRKFDNLTKAERGGLSELDKAGFIKRQLVETRQITKHVAQILDSRMNTKYDENDKLIREVKVITLKSKLVSDFRKDFQFYKVREINNYHHAHDAYLNAVVGTALIKKYPKLESEFVYGDYKVYDVRKMIAKSEQEIGKATAKYFFYSNIMNFFKTEITLANGEIRKRPLIETNGETGEIVWDKGRDFATVRKVLSMPQVNIVKKTEVQTGGFSKESILPKRNSDKLIARKKDWDPKKYGGFDSPTVAYSVLVVAKVEKGKSKKLKSVKELLGITIMERSSFEKNPIDFLEAKGYKEVKKDLIIKLPKYSLFELENGRKRMLASAGELQKGNELALPSKYVNFLYLASHYEKLKGSPEDNEQKQLFVEQHKHYLDEIIEQISEFSKRVILADANLDKVLSAYNKHRDKPIREQAENIIHLFTLTNLGAPAAFKYFDTTIDRKRYTSTKEVLDATLIHQSITGLYETRIDLSQLGGDGGGGGGGSGSSGGVQEISDSRPMLHIYLNGRRFLGLLDTGADKTCIAGRDWPANWPIHQTESSLQGLGMACGVARSSQPLRWQHEDKSGIIHPFVIPTLPFTLWGRDIMKDIKVRLMTDSPDDSQDLMIGAIESNLFADQISWKSDQPVWLNQWPLKQEKLQALQQLVTEQLQLGHLEESNSPWNTPVFVIKKKSGKWRLLQDLRAVNATMHDMGALQPGLPSPVAVPKGWEIIIIDLQDCFFNIKLHPEDCKRFAFSVPSPNFKRPYQRFQWKVLPQGMKNSPTLCQKFVDKAILTVRDKYQDSYIVHYMDDILLAHPSRSIVDEILTSMIQALNKHGLVVSTEKIQKYDNLKYLGTHIQGDSVSYQKLQIRTDKLRTLNDFQKLLGNINWIRPFLKLTTGELKPLFEILNGDSNPISTRKLTPEACKALQLMNERLSTARVKRLDLSQPWSLCILKTEYTPTACLWQDGVVEWIHLPHISPKVITPYDIFCTQLIIKGRHRSKELFSKDPDYIVVPYTKVQFDLLLQEKEDWPISLLGFLGEVHFHLPKDPLLTFTLQTAIIFPHMTSTTPLEKGIVIFTDGSANGRSVTYIQGREPIIKENTQNTAQQAEIVAVITAFEEVSQPFNLYTDSKYVTGLFPEIETATLSPRTKIYTELKHLQRLIHKRQEKFYIGHIRGHTGLPGPLAQGNAYADSLTRILTAAGKRTADGSEFEKRTADGSEFESPKKKAKVEGSGEGRGSLLTCGDVEENPG

SEQ ID NO: 3705 - protein, 2140 aa, synthetic construct
MPAAKRVKLDGGDKKYSIGLDIGTNSVGWAVITDEYKVPSKKFKVLGNTDRHSIKKNLIGALLFDSGETAEATRLKRTARRRYTRRKNRICYLQEIFSNEMAKVDDSFFHRLEESFLVEEDKKHERHPIFGNIVDEVAYHEKYPTIYHLRKKLVDSTDKADLRLIYLALAHMIKFRGHFLIEGDLNPDNSDVDKLFIQLVQTYNQLFEENPINASGVDAKAILSARLSKSRRLENLIAQLPGEKKNGLFGNLIALSLGLTPNFKSNFDLAEDAKLQLSKDTYDDDLDNLLAQIGDQYADLFLAAKNLSDAILLSDILRVNTEITKAPLSASMIKRYDEHHQDLTLLKALVRQQLPEKYKEIFFDQSKNGYAGYIDGGASQEEFYKFIKPILEKMDGTEELLVKLNREDLLRKQRTFDNGSIPHQIHLGELHAILRRQEDFYPFLKDNREKIEKILTFRIPYYVGPLARGNSRFAWMTRKSEETITPWNFEEVVDKGASAQSFIERMTNFDKNLPNEKVLPKHSLLYEYFTVYNELTKVKYVTEGMRKPAFLSGEQKKAIVDLLFKTNRKVTVKQLKEDYFKKIECFDSVEISGVEDRFNASLGTYHDLLKIIKDKDFLDNEENEDILEDIVLTLTLFEDREMIEERLKTYAHLFDDKVMKQLKRRRYTGWGRLSRKLINGIRDKQSGKTILDFLKSDGFANRNFMQLIHDDSLTFKEDIQKAQVSGQGDSLHEHIANLAGSPAIKKGILQTVKVVDELVKVMGRHKPENIVIEMARENQTTQKGQKNSRERMKRIEEGIKELGSQILKEHPVENTQLQNEKLYLYYLQNGRDMYVDQELDINRLSDYDVDHIVPQSFLKDDSIDNKVLTRSDKARGKSDNVPSEEVVKKMKNYWRQLLNAKLITQRKFDNLTKAERGGLSELDKAGFIKRQLVETRQITKHVAQILDSRMNTKYDENDKLIREVKVITLKSKLVSDFRKDFQFYKVREINNYHHAHDAYLNAVVGTALIKKYPKLESEFVYGDYKVYDVRKMIAKSEQEIGKATAKYFFYSNIMNFFKTEITLANGEIRKRPLIETNGETGEIVWDKGRDFATVRKVLSMPQVNIVKKTEVQTGGFSKESILPKRNSDKLIARKKDWDPKKYGGFDSPTVAYSVLVVAKVEKGKSKKLKSVKELLGITIMERSSFEKNPIDFLEAKGYKEVKKDLIIKLPKYSLFELENGRKRMLASAGELQKGNELALPSKYVNFLYLASHYEKLKGSPEDNEQKQLFVEQHKHYLDEIIEQISEFSKRVILADANLDKVLSAYNKHRDKPIREQAENIIHLFTLTNLGAPAAFKYFDTTIDRKRYTSTKEVLDATLIHQSITGLYETRIDLSQLGGDGGGGSGGSGGSGGSGGSGGVQEISDSRPMLHIYLNGRRFLGLLDTGADKTCIAGRDWPANWPIHQTESSLQGLGMACGVARSSQPLRWQHEDKSGIIHPFVIPTLPFTLWGRDIMKDIKVRLMTDSPDDSQDLMIGAIESNLFADQISWKSDQPVWLNQWPLKQEKLQALQQLVTEQLQLGHLEESNSPWNTPVFVIKKKSGKWRLLQDLRAVNATMHDMGALQPGLPSPVAVPKGWEIIIIDLQDCFFNIKLHPEDCKRFAFSVPSPNFKRPYQRFQWKVLPQGMKNSPTLCQKFVDKAILTVRDKYQDSYIVHYMDDILLAHPSRSIVDEILTSMIQALNKHGLVVSTEKIQKYDNLKYLGTHIQGDSVSYQKLQIRTDKLRTLNDFQKLLGNINWIRPFLKLTTGELKPLFEILNGDSNPISTRKLTPEACKALQLMNERLSTARVKRLDLSQPWSLCILKTEYTPTACLWQDGVVEWIHLPHISPKVITPYDIFCTQLIIKGRHRSKELFSKDPDYIVVPYTKVQFDLLLQEKEDWPISLLGFLGEVHFHLPKDPLLTFTLQTAIIFPHMTSTTPLEKGIVIFTDGSANGRSVTYIQGREPIIKENTQNTAQQAEIVAVITAFEEVSQPFNLYTDSKYVTGLFPEIETATLSPRTKIYTELKHLQRLIHKRQEKFYIGHIRGHTGLPGPLAQGNAYADSLTRILTAAGKRTADGSEFEKRTADGSEFESPKKKAKVEGSGEGRGSLLTCGDVEENPG

SEQ ID NO: 3706 - protein, 2136 aa, synthetic construct
MPAAKRVKLDGGDKKYSIGLDIGTNSVGWAVITDEYKVPSKKFKVLGNTDRHSIKKNLIGALLFDSGETAEATRLKRTARRRYTRRKNRICYLQEIFSNEMAKVDDSFFHRLEESFLVEEDKKHERHPIFGNIVDEVAYHEKYPTIYHLRKKLVDSTDKADLRLIYLALAHMIKFRGHFLIEGDLNPDNSDVDKLFIQLVQTYNQLFEENPINASGVDAKAILSARLSKSRRLENLIAQLPGEKKNGLFGNLIALSLGLTPNFKSNFDLAEDAKLQLSKDTYDDDLDNLLAQIGDQYADLFLAAKNLSDAILLSDILRVNTEITKAPLSASMIKRYDEHHQDLTLLKALVRQQLPEKYKEIFFDQSKNGYAGYIDGGASQEEFYKFIKPILEKMDGTEELLVKLNREDLLRKQRTFDNGSIPHQIHLGELHAILRRQEDFYPFLKDNREKIEKILTFRIPYYVGPLARGNSRFAWMTRKSEETITPWNFEEVVDKGASAQSFIERMTNFDKNLPNEKVLPKHSLLYEYFTVYNELTKVKYVTEGMRKPAFLSGEQKKAIVDLLFKTNRKVTVKQLKEDYFKKIECFDSVEISGVEDRFNASLGTYHDLLKIIKDKDFLDNEENEDILEDIVLTLTLFEDREMIEERLKTYAHLFDDKVMKQLKRRRYTGWGRLSRKLINGIRDKQSGKTILDFLKSDGFANRNFMQLIHDDSLTFKEDIQKAQVSGQGDSLHEHIANLAGSPAIKKGILQTVKVVDELVKVMGRHKPENIVIEMARENQTTQKGQKNSRERMKRIEEGIKELGSQILKEHPVENTQLQNEKLYLYYLQNGRDMYVDQELDINRLSDYDVDHIVPQSFLKDDSIDNKVLTRSDKARGKSDNVPSEEVVKKMKNYWRQLLNAKLITQRKFDNLTKAERGGLSELDKAGFIKRQLVETRQITKHVAQILDSRMNTKYDENDKLIREVKVITLKSKLVSDFRKDFQFYKVREINNYHHAHDAYLNAVVGTALIKKYPKLESEFVYGDYKVYDVRKMIAKSEQEIGKATAKYFFYSNIMNFFKTEITLANGEIRKRPLIETNGETGEIVWDKGRDFATVRKVLSMPQVNIVKKTEVQTGGFSKESILPKRNSDKLIARKKDWDPKKYGGFDSPTVAYSVLVVAKVEKGKSKKLKSVKELLGITIMERSSFEKNPIDFLEAKGYKEVKKDLIIKLPKYSLFELENGRKRMLASAGELQKGNELALPSKYVNFLYLASHYEKLKGSPEDNEQKQLFVEQHKHYLDEIIEQISEFSKRVILADANLDKVLSAYNKHRDKPIREQAENIIHLFTLTNLGAPAAFKYFDTTIDRKRYTSTKEVLDATLIHQSITGLYETRIDLSQLGGDGGGSSEAAAKGGSGGVQEISDSRPMLHIYLNGRRFLGLLDTGADKTCIAGRDWPANWPIHQTESSLQGLGMACGVARSSQPLRWQHEDKSGIIHPFVIPTLPFTLWGRDIMKDIKVRLMTDSPDDSQDLMIGAIESNLFADQISWKSDQPVWLNQWPLKQEKLQALQQLVTEQLQLGHLEESNSPWNTPVFVIKKKSGKWRLLQDLRAVNATMHDMGALQPGLPSPVAVPKGWEIIIIDLQDCFFNIKLHPEDCKRFAFSVPSPNFKRPYQRFQWKVLPQGMKNSPTLCQKFVDKAILTVRDKYQDSYIVHYMDDILLAHPSRSIVDEILTSMIQALNKHGLVVSTEKIQKYDNLKYLGTHIQGDSVSYQKLQIRTDKLRTLNDFQKLLGNINWIRPFLKLTTGELKPLFEILNGDSNPISTRKLTPEACKALQLMNERLSTARVKRLDLSQPWSLCILKTEYTPTACLWQDGVVEWIHLPHISPKVITPYDIFCTQLIIKGRHRSKELFSKDPDYIVVPYTKVQFDLLLQEKEDWPISLLGFLGEVHFHLPKDPLLTFTLQTAIIFPHMTSTTPLEKGIVIFTDGSANGRSVTYIQGREPIIKENTQNTAQQAEIVAVITAFEEVSQPFNLYTDSKYVTGLFPEIETATLSPRTKIYTELKHLQRLIHKRQEKFYIGHIRGHTGLPGPLAQGNAYADSLTRILTAAGKRTADGSEFEKRTADGSEFESPKKKAKVEGSGEGRGSLLTCGDVEENPG

SEQ ID NO: 3707 - protein, 2136 aa, synthetic construct
MPAAKRVKLDGGDKKYSIGLDIGTNSVGWAVITDEYKVPSKKFKVLGNTDRHSIKKNLIGALLFDSGETAEATRLKRTARRRYTRRKNRICYLQEIFSNEMAKVDDSFFHRLEESFLVEEDKKHERHPIFGNIVDEVAYHEKYPTIYHLRKKLVDSTDKADLRLIYLALAHMIKFRGHFLIEGDLNPDNSDVDKLFIQLVQTYNQLFEENPINASGVDAKAILSARLSKSRRLENLIAQLPGEKKNGLFGNLIALSLGLTPNFKSNFDLAEDAKLQLSKDTYDDDLDNLLAQIGDQYADLFLAAKNLSDAILLSDILRVNTEITKAPLSASMIKRYDEHHQDLTLLKALVRQQLPEKYKEIFFDQSKNGYAGYIDGGASQEEFYKFIKPILEKMDGTEELLVKLNREDLLRKQRTFDNGSIPHQIHLGELHAILRRQEDFYPFLKDNREKIEKILTFRIPYYVGPLARGNSRFAWMTRKSEETITPWNFEEVVDKGASAQSFIERMTNFDKNLPNEKVLPKHSLLYEYFTVYNELTKVKYVTEGMRKPAFLSGEQKKAIVDLLFKTNRKVTVKQLKEDYFKKIECFDSVEISGVEDRFNASLGTYHDLLKIIKDKDFLDNEENEDILEDIVLTLTLFEDREMIEERLKTYAHLFDDKVMKQLKRRRYTGWGRLSRKLINGIRDKQSGKTILDFLKSDGFANRNFMQLIHDDSLTFKEDIQKAQVSGQGDSLHEHIANLAGSPAIKKGILQTVKVVDELVKVMGRHKPENIVIEMARENQTTQKGQKNSRERMKRIEEGIKELGSQILKEHPVENTQLQNEKLYLYYLQNGRDMYVDQELDINRLSDYDVDHIVPQSFLKDDSIDNKVLTRSDKARGKSDNVPSEEVVKKMKNYWRQLLNAKLITQRKFDNLTKAERGGLSELDKAGFIKRQLVETRQITKHVAQILDSRMNTKYDENDKLIREVKVITLKSKLVSDFRKDFQFYKVREINNYHHAHDAYLNAVVGTALIKKYPKLESEFVYGDYKVYDVRKMIAKSEQEIGKATAKYFFYSNIMNFFKTEITLANGEIRKRPLIETNGETGEIVWDKGRDFATVRKVLSMPQVNIVKKTEVQTGGFSKESILPKRNSDKLIARKKDWDPKKYGGFDSPTVAYSVLVVAKVEKGKSKKLKSVKELLGITIMERSSFEKNPIDFLEAKGYKEVKKDLIIKLPKYSLFELENGRKRMLASAGELQKGNELALPSKYVNFLYLASHYEKLKGSPEDNEQKQLFVEQHKHYLDEIIEQISEFSKRVILADANLDKVLSAYNKHRDKPIREQAENIIHLFTLTNLGAPAAFKYFDTTIDRKRYTSTKEVLDATLIHQSITGLYETRIDLSQLGGDGGGGSPAPEAAAKGGVQEISDSRPMLHIYLNGRRFLGLLDTGADKTCIAGRDWPANWPIHQTESSLQGLGMACGVARSSQPLRWQHEDKSGIIHPFVIPTLPFTLWGRDIMKDIKVRLMTDSPDDSQDLMIGAIESNLFADQISWKSDQPVWLNQWPLKQEKLQALQQLVTEQLQLGHLEESNSPWNTPVFVIKKKSGKWRLLQDLRAVNATMHDMGALQPGLPSPVAVPKGWEIIIIDLQDCFFNIKLHPEDCKRFAFSVPSPNFKRPYQRFQWKVLPQGMKNSPTLCQKFVDKAILTVRDKYQDSYIVHYMDDILLAHPSRSIVDEILTSMIQALNKHGLVVSTEKIQKYDNLKYLGTHIQGDSVSYQKLQIRTDKLRTLNDFQKLLGNINWIRPFLKLTTGELKPLFEILNGDSNPISTRKLTPEACKALQLMNERLSTARVKRLDLSQPWSLCILKTEYTPTACLWQDGVVEWIHLPHISPKVITPYDIFCTQLIIKGRHRSKELFSKDPDYIVVPYTKVQFDLLLQEKEDWPISLLGFLGEVHFHLPKDPLLTFTLQTAIIFPHMTSTTPLEKGIVIFTDGSANGRSVTYIQGREPIIKENTQNTAQQAEIVAVITAFEEVSQPFNLYTDSKYVTGLFPEIETATLSPRTKIYTELKHLQRLIHKRQEKFYIGHIRGHTGLPGPLAQGNAYADSLTRILTAAGKRTADGSEFEKRTADGSEFESPKKKAKVEGSGEGRGSLLTCGDVEENPG

SEQ ID NO: 3708 - protein, 2171 aa, synthetic construct
MPAAKRVKLDGGDKKYSIGLDIGTNSVGWAVITDEYKVPSKKFKVLGNTDRHSIKKNLIGALLFDSGETAEATRLKRTARRRYTRRKNRICYLQEIFSNEMAKVDDSFFHRLEESFLVEEDKKHERHPIFGNIVDEVAYHEKYPTIYHLRKKLVDSTDKADLRLIYLALAHMIKFRGHFLIEGDLNPDNSDVDKLFIQLVQTYNQLFEENPINASGVDAKAILSARLSKSRRLENLIAQLPGEKKNGLFGNLIALSLGLTPNFKSNFDLAEDAKLQLSKDTYDDDLDNLLAQIGDQYADLFLAAKNLSDAILLSDILRVNTEITKAPLSASMIKRYDEHHQDLTLLKALVRQQLPEKYKEIFFDQSKNGYAGYIDGGASQEEFYKFIKPILEKMDGTEELLVKLNREDLLRKQRTFDNGSIPHQIHLGELHAILRRQEDFYPFLKDNREKIEKILTFRIPYYVGPLARGNSRFAWMTRKSEETITPWNFEEVVDKGASAQSFIERMTNFDKNLPNEKVLPKHSLLYEYFTVYNELTKVKYVTEGMRKPAFLSGEQKKAIVDLLFKTNRKVTVKQLKEDYFKKIECFDSVEISGVEDRFNASLGTYHDLLKIIKDKDFLDNEENEDILEDIVLTLTLFEDREMIEERLKTYAHLFDDKVMKQLKRRRYTGWGRLSRKLINGIRDKQSGKTILDFLKSDGFANRNFMQLIHDDSLTFKEDIQKAQVSGQGDSLHEHIANLAGSPAIKKGILQTVKVVDELVKVMGRHKPENIVIEMARENQTTQKGQKNSRERMKRIEEGIKELGSQILKEHPVENTQLQNEKLYLYYLQNGRDMYVDQELDINRLSDYDVDHIVPQSFLKDDSIDNKVLTRSDKARGKSDNVPSEEVVKKMKNYWRQLLNAKLITQRKFDNLTKAERGGLSELDKAGFIKRQLVETRQITKHVAQILDSRMNTKYDENDKLIREVKVITLKSKLVSDFRKDFQFYKVREINNYHHAHDAYLNAVVGTALIKKYPKLESEFVYGDYKVYDVRKMIAKSEQEIGKATAKYFFYSNIMNFFKTEITLANGEIRKRPLIETNGETGEIVWDKGRDFATVRKVLSMPQVNIVKKTEVQTGGFSKESILPKRNSDKLIARKKDWDPKKYGGFDSPTVAYSVLVVAKVEKGKSKKLKSVKELLGITIMERSSFEKNPIDFLEAKGYKEVKKDLIIKLPKYSLFELENGRKRMLASAGELQKGNELALPSKYVNFLYLASHYEKLKGSPEDNEQKQLFVEQHKHYLDEIIEQISEFSKRVILADANLDKVLSAYNKHRDKPIREQAENIIHLFTLTNLGAPAAFKYFDTTIDRKRYTSTKEVLDATLIHQSITGLYETRIDLSQLGGDGGAEAAAKEAAAKEAAAKEAAAKALEAEAAAKEAAAKEAAAKEAAAKAGGVQEISDSRPMLHIYLNGRRFLGLLDTGADKTCIAGRDWPANWPIHQTESSLQGLGMACGVARSSQPLRWQHEDKSGIIHPFVIPTLPFTLWGRDIMKDIKVRLMTDSPDDSQDLMIGAIESNLFADQISWKSDQPVWLNQWPLKQEKLQALQQLVTEQLQLGHLEESNSPWNTPVFVIKKKSGKWRLLQDLRAVNATMHDMGALQPGLPSPVAVPKGWEIIIIDLQDCFFNIKLHPEDCKRFAFSVPSPNFKRPYQRFQWKVLPQGMKNSPTLCQKFVDKAILTVRDKYQDSYIVHYMDDILLAHPSRSIVDEILTSMIQALNKHGLVVSTEKIQKYDNLKYLGTHIQGDSVSYQKLQIRTDKLRTLNDFQKLLGNINWIRPFLKLTTGELKPLFEILNGDSNPISTRKLTPEACKALQLMNERLSTARVKRLDLSQPWSLCILKTEYTPTACLWQDGVVEWIHLPHISPKVITPYDIFCTQLIIKGRHRSKELFSKDPDYIVVPYTKVQFDLLLQEKEDWPISLLGFLGEVHFHLPKDPLLTFTLQTAIIFPHMTSTTPLEKGIVIFTDGSANGRSVTYIQGREPIIKENTQNTAQQAEIVAVITAFEEVSQPFNLYTDSKYVTGLFPEIETATLSPRTKIYTELKHLQRLIHKRQEKFYIGHIRGHTGLPGPLAQGNAYADSLTRILTAAGKRTADGSEFEKRTADGSEFESPKKKAKVEGSGEGRGSLLTCGDVEENPG

SEQ ID NO: 3709 - protein, 2002 aa, synthetic construct; identical to SEQ ID NO: 3564

SEQ ID NO: 3710 - protein, 2025 aa, synthetic construct
MKRTADGSEFESPKKKRKVDKKYSIGLDIGTNSVGWAVITDEYKVPSKKFKVLGNTDRHSIKKNLIGALLFDSGETAEATRLKRTARRRYTRRKNRICYLQEIFSNEMAKVDDSFFHRLEESFLVEEDKKHERHPIFGNIVDEVAYHEKYPTIYHLRKKLVDSTDKADLRLIYLALAHMIKFRGHFLIEGDLNPDNSDVDKLFIQLVQTYNQLFEENPINASGVDAKAILSARLSKSRRLENLIAQLPGEKKNGLFGNLIALSLGLTPNFKSNFDLAEDAKLQLSKDTYDDDLDNLLAQIGDQYADLFLAAKNLSDAILLSDILRVNTEITKAPLSASMIKRYDEHHQDLTLLKALVRQQLPEKYKEIFFDQSKNGYAGYIDGGASQEEFYKFIKPILEKMDGTEELLVKLNREDLLRKQRTFDNGSIPHQIHLGELHAILRRQEDFYPFLKDNREKIEKILTFRIPYYVGPLARGNSRFAWMTRKSEETITPWNFEEVVDKGASAQSFIERMTNFDKNLPNEKVLPKHSLLYEYFTVYNELTKVKYVTEGMRKPAFLSGEQKKAIVDLLFKTNRKVTVKQLKEDYFKKIECFDSVEISGVEDRFNASLGTYHDLLKIIKDKDFLDNEENEDILEDIVLTLTLFEDREMIEERLKTYAHLFDDKVMKQLKRRRYTGWGRLSRKLINGIRDKQSGKTILDFLKSDGFANRNFMQLIHDDSLTFKEDIQKAQVSGQGDSLHEHIANLAGSPAIKKGILQTVKVVDELVKVMGRHKPENIVIEMARENQTTQKGQKNSRERMKRIEEGIKELGSQILKEHPVENTQLQNEKLYLYYLQNGRDMYVDQELDINRLSDYDVDHIVPQSFLKDDSIDNKVLTRSDKARGKSDNVPSEEVVKKMKNYWRQLLNAKLITQRKFDNLTKAERGGLSELDKAGFIKRQLVETRQITKHVAQILDSRMNTKYDENDKLIREVKVITLKSKLVSDFRKDFQFYKVREINNYHHAHDAYLNAVVGTALIKKYPKLESEFVYGDYKVYDVRKMIAKSEQEIGKATAKYFFYSNIMNFFKTEITLANGEIRKRPLIETNGETGEIVWDKGRDFATVRKVLSMPQVNIVKKTEVQTGGFSKESILPKRNSDKLIARKKDWDPKKYGGFDSPTVAYSVLVVAKVEKGKSKKLKSVKELLGITIMERSSFEKNPIDFLEAKGYKEVKKDLIIKLPKYSLFELENGRKRMLASAGELQKGNELALPSKYVNFLYLASHYEKLKGSPEDNEQKQLFVEQHKHYLDEIIEQISEFSKRVILADANLDKVLSAYNKHRDKPIREQAENIIHLFTLTNLGAPAAFKYFDTTIDRKRYTSTKEVLDATLIHQSITGLYETRIDLSQLGGDSGGSSGGSSGSETPGTSESATPESSGGSSGGSSTAAIDILAPQQCAEPITWKSDEPVWVDQWPLTNDKLAAAQQLVQEQLEAGHITESSSPWNTPIFVIKKKSGKWRLLQDLRAVNATMVLMGALQPGLPSPVAIPQGYLKIIIDLKDCFFSIPLHPSDQKRFAFSLPSTNFKEPMQRFQWKVLPQGMANSPTLCQKYVATAIHKVRHAWKQMYIIHYMDDILIAGKDGQQVLQCFDQLKQELTAAGLHIAPEKVQLQDPYTYLGFELNGPKITNQKAVIRKDKLQTLNDFQKLLGDINWLRPYLKLTTGDLKPLFDTLKGDSDPNSHRSLSKEALASLEKVETAIAEQFVTHINYSLPLIFLIFNTALTPTGLFWQDNPIMWIHLPASPKKVLLPYYDAIADLIILGRDHSKKYFGIEPSTIIQPYSKSQIDWLMQNTEMWPIACASFVGILDNHYPPNKLIQFCKLHTFVFPQIISKTPLNNALLVFTDGSSTGMAAYTLTDTTIKFQTNLNSAQLVELQALIAVLSAFPNQPLNIYTDSAYLAHSIPLLETVAQIKHISETAKLFLQCQQLIYNRSIPFYIGHVRAHSGLPGPIAQGNQRADLATKIVASNINTNSGGSKRTADGSEFEPKKKRKV

SEQ ID NO: 3711 - protein, 2030 aa, synthetic construct
MPAAKRVKLDGGDKKYSIGLDIGTNSVGWAVITDEYKVPSKKFKVLGNTDRHSIKKNLIGALLFDSGETAEATRLKRTARRRYTRRKNRICYLQEIFSNEMAKVDDSFFHRLEESFLVEEDKKHERHPIFGNIVDEVAYHEKYPTIYHLRKKLVDSTDKADLRLIYLALAHMIKFRGHFLIEGDLNPDNSDVDKLFIQLVQTYNQLFEENPINASGVDAKAILSARLSKSRRLENLIAQLPGEKKNGLFGNLIALSLGLTPNFKSNFDLAEDAKLQLSKDTYDDDLDNLLAQIGDQYADLFLAAKNLSDAILLSDILRVNTEITKAPLSASMIKRYDEHHQDLTLLKALVRQQLPEKYKEIFFDQSKNGYAGYIDGGASQEEFYKFIKPILEKMDGTEELLVKLNREDLLRKQRTFDNGSIPHQIHLGELHAILRRQEDFYPFLKDNREKIEKILTFRIPYYVGPLARGNSRFAWMTRKSEETITPWNFEEVVDKGASAQSFIERMTNFDKNLPNEKVLPKHSLLYEYFTVYNELTKVKYVTEGMRKPAFLSGEQKKAIVDLLFKTNRKVTVKQLKEDYFKKIECFDSVEISGVEDRFNASLGTYHDLLKIIKDKDFLDNEENEDILEDIVLTLTLFEDREMIEERLKTYAHLFDDKVMKQLKRRRYTGWGRLSRKLINGIRDKQSGKTILDFLKSDGFANRNFMQLIHDDSLTFKEDIQKAQVSGQGDSLHEHIANLAGSPAIKKGILQTVKVVDELVKVMGRHKPENIVIEMARENQTTQKGQKNSRERMKRIEEGIKELGSQILKEHPVENTQLQNEKLYLYYLQNGRDMYVDQELDINRLSDYDVDHIVPQSFLKDDSIDNKVLTRSDKARGKSDNVPSEEVVKKMKNYWRQLLNAKLITQRKFDNLTKAERGGLSELDKAGFIKRQLVETRQITKHVAQILDSRMNTKYDENDKLIREVKVITLKSKLVSDFRKDFQFYKVREINNYHHAHDAYLNAVVGTALIKKYPKLESEFVYGDYKVYDVRKMIAKSEQEIGKATAKYFFYSNIMNFFKTEITLANGEIRKRPLIETNGETGEIVWDKGRDFATVRKVLSMPQVNIVKKTEVQTGGFSKESILPKRNSDKLIARKKDWDPKKYGGFDSPTVAYSVLVVAKVEKGKSKKLKSVKELLGITIMERSSFEKNPIDFLEAKGYKEVKKDLIIKLPKYSLFELENGRKRMLASAGELQKGNELALPSKYVNFLYLASHYEKLKGSPEDNEQKQLFVEQHKHYLDEIIEQISEFSKRVILADANLDKVLSAYNKHRDKPIREQAENIIHLFTLTNLGAPAAFKYFDTTIDRKRYTSTKEVLDATLIHQSITGLYETRIDLSQLGGDSGGSSGGSSGSETPGTSESATPESSGGSSGGSSTAAIDILAPQQCAEPITWKSDEPVWVDQWPLTNDKLAAAQQLVQEQLEAGHITESSSPWNTPIFVIKKKSGKWRLLQDLRAVNATMVLMGALQPGLPSPVAIPQGYLKIIIDLKDCFFSIPLHPSDQKRFAFSLPSTNFKEPMQRFQWKVLPQGMANSPTLCQKYVATAIHKVRHAWKQMYIIHYMDDILIAGKDGQQVLQCFDQLKQELTAAGLHIAPEKVQLQDPYTYLGFELNGPKITNQKAVIRKDKLQTLNDFQKLLGDINWLRPYLKLTTGDLKPLFDTLKGDSDPNSHRSLSKEALASLEKVETAIAEQFVTHINYSLPLIFLIFNTALTPTGLFWQDNPIMWIHLPASPKKVLLPYYDAIADLIILGRDHSKKYFGIEPSTIIQPYSKSQIDWLMQNTEMWPIACASFVGILDNHYPPNKLIQFCKLHTFVFPQIISKTPLNNALLVFTDGSSTGMAAYTLTDTTIKFQTNLNSAQLVELQALIAVLSAFPNQPLNIYTDSAYLAHSIPLLETVAQIKHISETAKLFLQCQQLIYNRSIPFYIGHVRAHSGLPGPIAQGNQRADLATKIVASNINTNSGGSKRTADGSEFEKRTADGSEFESPKKKAKVE

SEQ ID NO: 3712 - protein, 2052 aa, synthetic construct
MPAAKRVKLDGGDKKYSIGLDIGTNSVGWAVITDEYKVPSKKFKVLGNTDRHSIKKNLIGALLFDSGETAEATRLKRTARRRYTRRKNRICYLQEIFSNEMAKVDDSFFHRLEESFLVEEDKKHERHPIFGNIVDEVAYHEKYPTIYHLRKKLVDSTDKADLRLIYLALAHMIKFRGHFLIEGDLNPDNSDVDKLFIQLVQTYNQLFEENPINASGVDAKAILSARLSKSRRLENLIAQLPGEKKNGLFGNLIALSLGLTPNFKSNFDLAEDAKLQLSKDTYDDDLDNLLAQIGDQYADLFLAAKNLSDAILLSDILRVNTEITKAPLSASMIKRYDEHHQDLTLLKALVRQQLPEKYKEIFFDQSKNGYAGYIDGGASQEEFYKFIKPILEKMDGTEELLVKLNREDLLRKQRTFDNGSIPHQIHLGELHAILRRQEDFYPFLKDNREKIEKILTFRIPYYVGPLARGNSRFAWMTRKSEETITPWNFEEVVDKGASAQSFIERMTNFDKNLPNEKVLPKHSLLYEYFTVYNELTKVKYVTEGMRKPAFLSGEQKKAIVDLLFKTNRKVTVKQLKEDYFKKIECFDSVEISGVEDRFNASLGTYHDLLKIIKDKDFLDNEENEDILEDIVLTLTLFEDREMIEERLKTYAHLFDDKVMKQLKRRRYTGWGRLSRKLINGIRDKQSGKTILDFLKSDGFANRNFMQLIHDDSLTFKEDIQKAQVSGQGDSLHEHIANLAGSPAIKKGILQTVKVVDELVKVMGRHKPENIVIEMARENQTTQKGQKNSRERMKRIEEGIKELGSQILKEHPVENTQLQNEKLYLYYLQNGRDMYVDQELDINRLSDYDVDHIVPQSFLKDDSIDNKVLTRSDKARGKSDNVPSEEVVKKMKNYWRQLLNAKLITQRKFDNLTKAERGGLSELDKAGFIKRQLVETRQITKHVAQILDSRMNTKYDENDKLIREVKVITLKSKLVSDFRKDFQFYKVREINNYHHAHDAYLNAVVGTALIKKYPKLESEFVYGDYKVYDVRKMIAKSEQEIGKATAKYFFYSNIMNFFKTEITLANGEIRKRPLIETNGETGEIVWDKGRDFATVRKVLSMPQVNIVKKTEVQTGGFSKESILPKRNSDKLIARKKDWDPKKYGGFDSPTVAYSVLVVAKVEKGKSKKLKSVKELLGITIMERSSFEKNPIDFLEAKGYKEVKKDLIIKLPKYSLFELENGRKRMLASAGELQKGNELALPSKYVNFLYLASHYEKLKGSPEDNEQKQLFVEQHKHYLDEIIEQISEFSKRVILADANLDKVLSAYNKHRDKPIREQAENIIHLFTLTNLGAPAAFKYFDTTIDRKRYTSTKEVLDATLIHQSITGLYETRIDLSQLGGDGGSGGSSGGSSGSETPGTSESATPESSGGSSGGSSGGMTAAIDILAPQQCAEPITWKSDEPVWVDQWPLTNDKLAAAQQLVQEQLEAGHITESSSPWNTPIFVIKKKSGKWRLLQDLRAVNATMVLMGALQPGLPSPVAIPQGYLKIIIDLKDCFFSIPLHPSDQKRFAFSLPSTNFKEPMQRFQWKVLPQGMANSPTLCQKYVATAIHKVRHAWKQMYIIHYMDDILIAGKDGQQVLQCFDQLKQELTAAGLHIAPEKVQLQDPYTYLGFELNGPKITNQKAVIRKDKLQTLNDFQKLLGDINWLRPYLKLTTGDLKPLFDTLKGDSDPNSHRSLSKEALASLEKVETAIAEQFVTHINYSLPLIFLIFNTALTPTGLFWQDNPIMWIHLPASPKKVLLPYYDAIADLIILGRDHSKKYFGIEPSTIIQPYSKSQIDWLMQNTEMWPIACASFVGILDNHYPPNKLIQFCKLHTFVFPQIISKTPLNNALLVFTDGSSTGMAAYTLTDTTIKFQTNLNSAQLVELQALIAVLSAFPNQPLNIYTDSAYLAHSIPLLETVAQIKHISETAKLFLQCQQLIYNRSIPFYIGHVRAHSGLPGPIAQGNQRADLATKIVASNINTAGKRTADGSEFEKRTADGSEFESPKKKAKVEGSGEGRGSLLTCGDVEENPG

SEQ ID NO: 3713 - protein, 2034 aa, synthetic construct
MPAAKRVKLDGGDKKYSIGLDIGTNSVGWAVITDEYKVPSKKFKVLGNTDRHSIKKNLIGALLFDSGETAEATRLKRTARRRYTRRKNRICYLQEIFSNEMAKVDDSFFHRLEESFLVEEDKKHERHPIFGNIVDEVAYHEKYPTIYHLRKKLVDSTDKADLRLIYLALAHMIKFRGHFLIEGDLNPDNSDVDKLFIQLVQTYNQLFEENPINASGVDAKAILSARLSKSRRLENLIAQLPGEKKNGLFGNLIALSLGLTPNFKSNFDLAEDAKLQLSKDTYDDDLDNLLAQIGDQYADLFLAAKNLSDAILLSDILRVNTEITKAPLSASMIKRYDEHHQDLTLLKALVRQQLPEKYKEIFFDQSKNGYAGYIDGGASQEEFYKFIKPILEKMDGTEELLVKLNREDLLRKQRTFDNGSIPHQIHLGELHAILRRQEDFYPFLKDNREKIEKILTFRIPYYVGPLARGNSRFAWMTRKSEETITPWNFEEVVDKGASAQSFIERMTNFDKNLPNEKVLPKHSLLYEYFTVYNELTKVKYVTEGMRKPAFLSGEQKKAIVDLLFKTNRKVTVKQLKEDYFKKIECFDSVEISGVEDRFNASLGTYHDLLKIIKDKDFLDNEENEDILEDIVLTLTLFEDREMIEERLKTYAHLFDDKVMKQLKRRRYTGWGRLSRKLINGIRDKQSGKTILDFLKSDGFANRNFMQLIHDDSLTFKEDIQKAQVSGQGDSLHEHIANLAGSPAIKKGILQTVKVVDELVKVMGRHKPENIVIEMARENQTTQKGQKNSRERMKRIEEGIKELGSQILKEHPVENTQLQNEKLYLYYLQNGRDMYVDQELDINRLSDYDVDHIVPQSFLKDDSIDNKVLTRSDKARGKSDNVPSEEVVKKMKNYWRQLLNAKLITQRKFDNLTKAERGGLSELDKAGFIKRQLVETRQITKHVAQILDSRMNTKYDENDKLIREVKVITLKSKLVSDFRKDFQFYKVREINNYHHAHDAYLNAVVGTALIKKYPKLESEFVYGDYKVYDVRKMIAKSEQEIGKATAKYFFYSNIMNFFKTEITLANGEIRKRPLIETNGETGEIVWDKGRDFATVRKVLSMPQVNIVKKTEVQTGGFSKESILPKRNSDKLIARKKDWDPKKYGGFDSPTVAYSVLVVAKVEKGKSKKLKSVKELLGITIMERSSFEKNPIDFLEAKGYKEVKKDLIIKLPKYSLFELENGRKRMLASAGELQKGNELALPSKYVNFLYLASHYEKLKGSPEDNEQKQLFVEQHKHYLDEIIEQISEFSKRVILADANLDKVLSAYNKHRDKPIREQAENIIHLFTLTNLGAPAAFKYFDTTIDRKRYTSTKEVLDATLIHQSITGLYETRIDLSQLGGDGGGSSGSSGSSGSSGSSGGMTAAIDILAPQQCAEPITWKSDEPVWVDQWPLTNDKLAAAQQLVQEQLEAGHITESSSPWNTPIFVIKKKSGKWRLLQDLRAVNATMVLMGALQPGLPSPVAIPQGYLKIIIDLKDCFFSIPLHPSDQKRFAFSLPSTNFKEPMQRFQWKVLPQGMANSPTLCQKYVATAIHKVRHAWKQMYIIHYMDDILIAGKDGQQVLQCFDQLKQELTAAGLHIAPEKVQLQDPYTYLGFELNGPKITNQKAVIRKDKLQTLNDFQKLLGDINWLRPYLKLTTGDLKPLFDTLKGDSDPNSHRSLSKEALASLEKVETAIAEQFVTHINYSLPLIFLIFNTALTPTGLFWQDNPIMWIHLPASPKKVLLPYYDAIADLIILGRDHSKKYFGIEPSTIIQPYSKSQIDWLMQNTEMWPIACASFVGILDNHYPPNKLIQFCKLHTFVFPQIISKTPLNNALLVFTDGSSTGMAAYTLTDTTIKFQTNLNSAQLVELQALIAVLSAFPNQPLNIYTDSAYLAHSIPLLETVAQIKHISETAKLFLQCQQLIYNRSIPFYIGHVRAHSGLPGPIAQGNQRADLATKIVASNINTAGKRTADGSEFEKRTADGSEFESPKKKAKVEGSGEGRGSLLTCGDVEENPG

SEQ ID NO: 3714 - protein, 2044 aa, synthetic construct
MPAAKRVKLDGGDKKYSIGLDIGTNSVGWAVITDEYKVPSKKFKVLGNTDRHSIKKNLIGALLFDSGETAEATRLKRTARRRYTRRKNRICYLQEIFSNEMAKVDDSFFHRLEESFLVEEDKKHERHPIFGNIVDEVAYHEKYPTIYHLRKKLVDSTDKADLRLIYLALAHMIKFRGHFLIEGDLNPDNSDVDKLFIQLVQTYNQLFEENPINASGVDAKAILSARLSKSRRLENLIAQLPGEKKNGLFGNLIALSLGLTPNFKSNFDLAEDAKLQLSKDTYDDDLDNLLAQIGDQYADLFLAAKNLSDAILLSDILRVNTEITKAPLSASMIKRYDEHHQDLTLLKALVRQQLPEKYKEIFFDQSKNGYAGYIDGGASQEEFYKFIKPILEKMDGTEELLVKLNREDLLRKQRTFDNGSIPHQIHLGELHAILRRQEDFYPFLKDNREKIEKILTFRIPYYVGPLARGNSRFAWMTRKSEETITPWNFEEVVDKGASAQSFIERMTNFDKNLPNEKVLPKHSLLYEYFTVYNELTKVKYVTEGMRKPAFLSGEQKKAIVDLLFKTNRKVTVKQLKEDYFKKIECFDSVEISGVEDRFNASLGTYHDLLKIIKDKDFLDNEENEDILEDIVLTLTLFEDREMIEERLKTYAHLFDDKVMKQLKRRRYTGWGRLSRKLINGIRDKQSGKTILDFLKSDGFANRNFMQLIHDDSLTFKEDIQKAQVSGQGDSLHEHIANLAGSPAIKKGILQTVKVVDELVKVMGRHKPENIVIEMARENQTTQKGQKNSRERMKRIEEGIKELGSQILKEHPVENTQLQNEKLYLYYLQNGRDMYVDQELDINRLSDYDVDHIVPQSFLKDDSIDNKVLTRSDKARGKSDNVPSEEVVKKMKNYWRQLLNAKLITQRKFDNLTKAERGGLSELDKAGFIKRQLVETRQITKHVAQILDSRMNTKYDENDKLIREVKVITLKSKLVSDFRKDFQFYKVREINNYHHAHDAYLNAVVGTALIKKYPKLESEFVYGDYKVYDVRKMIAKSEQEIGKATAKYFFYSNIMNFFKTEITLANGEIRKRPLIETNGETGEIVWDKGRDFATVRKVLSMPQVNIVKKTEVQTGGFSKESILPKRNSDKLIARKKDWDPKKYGGFDSPTVAYSVLVVAKVEKGKSKKLKSVKELLGITIMERSSFEKNPIDFLEAKGYKEVKKDLIIKLPKYSLFELENGRKRMLASAGELQKGNELALPSKYVNFLYLASHYEKLKGSPEDNEQKQLFVEQHKHYLDEIIEQISEFSKRVILADANLDKVLSAYNKHRDKPIREQAENIIHLFTLTNLGAPAAFKYFDTTIDRKRYTSTKEVLDATLIHQSITGLYETRIDLSQLGGDGGEAAAKEAAAKEAAAKEAAAKEAAAKGGMTAAIDILAPQQCAEPITWKSDEPVWVDQWPLTNDKLAAAQQLVQEQLEAGHITESSSPWNTPIFVIKKKSGKWRLLQDLRAVNATMVLMGALQPGLPSPVAIPQGYLKIIIDLKDCFFSIPLHPSDQKRFAFSLPSTNFKEPMQRFQWKVLPQGMANSPTLCQKYVATAIHKVRHAWKQMYIIHYMDDILIAGKDGQQVLQCFDQLKQELTAAGLHIAPEKVQLQDPYTYLGFELNGPKITNQKAVIRKDKLQTLNDFQKLLGDINWLRPYLKLTTGDLKPLFDTLKGDSDPNSHRSLSKEALASLEKVETAIAEQFVTHINYSLPLIFLIFNTALTPTGLFWQDNPIMWIHLPASPKKVLLPYYDAIADLIILGRDHSKKYFGIEPSTIIQPYSKSQIDWLMQNTEMWPIACASFVGILDNHYPPNKLIQFCKLHTFVFPQIISKTPLNNALLVFTDGSSTGMAAYTLTDTTIKFQTNLNSAQLVELQALIAVLSAFPNQPLNIYTDSAYLAHSIPLLETVAQIKHISETAKLFLQCQQLIYNRSIPFYIGHVRAHSGLPGPIAQGNQRADLATKIVASNINTAGKRTADGSEFEKRTADGSEFESPKKKAKVEGSGEGRGSLLTCGDVEENPG

SEQ ID NO: 3715 - protein, 2049 aa, synthetic construct
MPAAKRVKLDGGDKKYSIGLDIGTNSVGWAVITDEYKVPSKKFKVLGNTDRHSIKKNLIGALLFDSGETAEATRLKRTARRRYTRRKNRICYLQEIFSNEMAKVDDSFFHRLEESFLVEEDKKHERHPIFGNIVDEVAYHEKYPTIYHLRKKLVDSTDKADLRLIYLALAHMIKFRGHFLIEGDLNPDNSDVDKLFIQLVQTYNQLFEENPINASGVDAKAILSARLSKSRRLENLIAQLPGEKKNGLFGNLIALSLGLTPNFKSNFDLAEDAKLQLSKDTYDDDLDNLLAQIGDQYADLFLAAKNLSDAILLSDILRVNTEITKAPLSASMIKRYDEHHQDLTLLKALVRQQLPEKYKEIFFDQSKNGYAGYIDGGASQEEFYKFIKPILEKMDGTEELLVKLNREDLLRKQRTFDNGSIPHQIHLGELHAILRRQEDFYPFLKDNREKIEKILTFRIPYYVGPLARGNSRFAWMTRKSEETITPWNFEEVVDKGASAQSFIERMTNFDKNLPNEKVLPKHSLLYEYFTVYNELTKVKYVTEGMRKPAFLSGEQKKAIVDLLFKTNRKVTVKQLKEDYFKKIECFDSVEISGVEDRFNASLGTYHDLLKIIKDKDFLDNEENEDILEDIVLTLTLFEDREMIEERLKTYAHLFDDKVMKQLKRRRYTGWGRLSRKLINGIRDKQSGKTILDFLKSDGFANRNFMQLIHDDSLTFKEDIQKAQVSGQGDSLHEHIANLAGSPAIKKGILQTVKVVDELVKVMGRHKPENIVIEMARENQTTQKGQKNSRERMKRIEEGIKELGSQILKEHPVENTQLQNEKLYLYYLQNGRDMYVDQELDINRLSDYDVDHIVPQSFLKDDSIDNKVLTRSDKARGKSDNVPSEEVVKKMKNYWRQLLNAKLITQRKFDNLTKAERGGLSELDKAGFIKRQLVETRQITKHVAQILDSRMNTKYDENDKLIREVKVITLKSKLVSDFRKDFQFYKVREINNYHHAHDAYLNAVVGTALIKKYPKLESEFVYGDYKVYDVRKMIAKSEQEIGKATAKYFFYSNIMNFFKTEITLANGEIRKRPLIETNGETGEIVWDKGRDFATVRKVLSMPQVNIVKKTEVQTGGFSKESILPKRNSDKLIARKKDWDPKKYGGFDSPTVAYSVLVVAKVEKGKSKKLKSVKELLGITIMERSSFEKNPIDFLEAKGYKEVKKDLIIKLPKYSLFELENGRKRMLASAGELQKGNELALPSKYVNFLYLASHYEKLKGSPEDNEQKQLFVEQHKHYLDEIIEQISEFSKRVILADANLDKVLSAYNKHRDKPIREQAENIIHLFTLTNLGAPAAFKYFDTTIDRKRYTSTKEVLDATLIHQSITGLYETRIDLSQLGGDGGEAAAKEAAAKEAAAKEAAAKEAAAKEAAAKGGMTAAIDILAPQQCAEPITWKSDEPVWVDQWPLTNDKLAAAQQLVQEQLEAGHITESSSPWNTPIFVIKKKSGKWRLLQDLRAVNATMVLMGALQPGLPSPVAIPQGYLKIIIDLKDCFFSIPLHPSDQKRFAFSLPSTNFKEPMQRFQWKVLPQGMANSPTLCQKYVATAIHKVRHAWKQMYIIHYMDDILIAGKDGQQVLQCFDQLKQELTAAGLHIAPEKVQLQDPYTYLGFELNGPKITNQKAVIRKDKLQTLNDFQKLLGDINWLRPYLKLTTGDLKPLFDTLKGDSDPNSHRSLSKEALASLEKVETAIAEQFVTHINYSLPLIFLIFNTALTPTGLFWQDNPIMWIHLPASPKKVLLPYYDAIADLIILGRDHSKKYFGIEPSTIIQPYSKSQIDWLMQNTEMWPIACASFVGILDNHYPPNKLIQFCKLHTFVFPQIISKTPLNNALLVFTDGSSTGMAAYTLTDTTIKFQTNLNSAQLVELQALIAVLSAFPNQPLNIYTDSAYLAHSIPLLETVAQIKHISETAKLFLQCQQLIYNRSIPFYIGHVRAHSGLPGPIAQGNQRADLATKIVASNINTAGKRTADGSEFEKRTADGSEFESPKKKAKVEGSGEGRGSLLTCGDVEENPG

SEQ ID NO: 3716 - protein, 2027 aa, synthetic construct
MPAAKRVKLDGGDKKYSIGLDIGTNSVGWAVITDEYKVPSKKFKVLGNTDRHSIKKNLIGALLFDSGETAEATRLKRTARRRYTRRKNRICYLQEIFSNEMAKVDDSFFHRLEESFLVEEDKKHERHPIFGNIVDEVAYHEKYPTIYHLRKKLVDSTDKADLRLIYLALAHMIKFRGHFLIEGDLNPDNSDVDKLFIQLVQTYNQLFEENPINASGVDAKAILSARLSKSRRLENLIAQLPGEKKNGLFGNLIALSLGLTPNFKSNFDLAEDAKLQLSKDTYDDDLDNLLAQIGDQYADLFLAAKNLSDAILLSDILRVNTEITKAPLSASMIKRYDEHHQDLTLLKALVRQQLPEKYKEIFFDQSKNGYAGYIDGGASQEEFYKFIKPILEKMDGTEELLVKLNREDLLRKQRTFDNGSIPHQIHLGELHAILRRQEDFYPFLKDNREKIEKILTFRIPYYVGPLARGNSRFAWMTRKSEETITPWNFEEVVDKGASAQSFIERMTNFDKNLPNEKVLPKHSLLYEYFTVYNELTKVKYVTEGMRKPAFLSGEQKKAIVDLLFKTNRKVTVKQLKEDYFKKIECFDSVEISGVEDRFNASLGTYHDLLKIIKDKDFLDNEENEDILEDIVLTLTLFEDREMIEERLKTYAHLFDDKVMKQLKRRRYTGWGRLSRKLINGIRDKQSGKTILDFLKSDGFANRNFMQLIHDDSLTFKEDIQKAQVSGQGDSLHEHIANLAGSPAIKKGILQTVKVVDELVKVMGRHKPENIVIEMARENQTTQKGQKNSRERMKRIEEGIKELGSQILKEHPVENTQLQNEKLYLYYLQNGRDMYVDQELDINRLSDYDVDHIVPQSFLKDDSIDNKVLTRSDKARGKSDNVPSEEVVKKMKNYWRQLLNAKLITQRKFDNLTKAERGGLSELDKAGFIKRQLVETRQITKHVAQILDSRMNTKYDENDKLIREVKVITLKSKLVSDFRKDFQFYKVREINNYHHAHDAYLNAVVGTALIKKYPKLESEFVYGDYKVYDVRKMIAKSEQEIGKATAKYFFYSNIMNFFKTEITLANGEIRKRPLIETNGETGEIVWDKGRDFATVRKVLSMPQVNIVKKTEVQTGGFSKESILPKRNSDKLIARKKDWDPKKYGGFDSPTVAYSVLVVAKVEKGKSKKLKSVKELLGITIMERSSFEKNPIDFLEAKGYKEVKKDLIIKLPKYSLFELENGRKRMLASAGELQKGNELALPSKYVNFLYLASHYEKLKGSPEDNEQKQLFVEQHKHYLDEIIEQISEFSKRVILADANLDKVLSAYNKHRDKPIREQAENIIHLFTLTNLGAPAAFKYFDTTIDRKRYTSTKEVLDATLIHQSITGLYETRIDLSQLGGDGGEAAAKGSSGGMTAAIDILAPQQCAEPITWKSDEPVWVDQWPLTNDKLAAAQQLVQEQLEAGHITESSSPWNTPIFVIKKKSGKWRLLQDLRAVNATMVLMGALQPGLPSPVAIPQGYLKIIIDLKDCFFSIPLHPSDQKRFAFSLPSTNFKEPMQRFQWKVLPQGMANSPTLCQKYVATAIHKVRHAWKQMYIIHYMDDILIAGKDGQQVLQCFDQLKQELTAAGLHIAPEKVQLQDPYTYLGFELNGPKITNQKAVIRKDKLQTLNDFQKLLGDINWLRPYLKLTTGDLKPLFDTLKGDSDPNSHRSLSKEALASLEKVETAIAEQFVTHINYSLPLIFLIFNTALTPTGLFWQDNPIMWIHLPASPKKVLLPYYDAIADLIILGRDHSKKYFGIEPSTIIQPYSKSQIDWLMQNTEMWPIACASFVGILDNHYPPNKLIQFCKLHTFVFPQIISKTPLNNALLVFTDGSSTGMAAYTLTDTTIKFQTNLNSAQLVELQALIAVLSAFPNQPLNIYTDSAYLAHSIPLLETVAQIKHISETAKLFLQCQQLIYNRSIPFYIGHVRAHSGLPGPIAQGNQRADLATKIVASNINTAGKRTADGSEFEKRTADGSEFESPKKKAKVEGSGEGRGSLLTCGDVEENPG

SEQ ID NO: 3717 - protein, 2027 aa, synthetic construct
MPAAKRVKLDGGDKKYSIGLDIGTNSVGWAVITDEYKVPSKKFKVLGNTDRHSIKKNLIGALLFDSGETAEATRLKRTARRRYTRRKNRICYLQEIFSNEMAKVDDSFFHRLEESFLVEEDKKHERHPIFGNIVDEVAYHEKYPTIYHLRKKLVDSTDKADLRLIYLALAHMIKFRGHFLIEGDLNPDNSDVDKLFIQLVQTYNQLFEENPINASGVDAKAILSARLSKSRRLENLIAQLPGEKKNGLFGNLIALSLGLTPNFKSNFDLAEDAKLQLSKDTYDDDLDNLLAQIGDQYADLFLAAKNLSDAILLSDILRVNTEITKAPLSASMIKRYDEHHQDLTLLKALVRQQLPEKYKEIFFDQSKNGYAGYIDGGASQEEFYKFIKPILEKMDGTEELLVKLNREDLLRKQRTFDNGSIPHQIHLGELHAILRRQEDFYPFLKDNREKIEKILTFRIPYYVGPLARGNSRFAWMTRKSEETITPWNFEEVVDKGASAQSFIERMTNFDKNLPNEKVLPKHSLLYEYFTVYNELTKVKYVTEGMRKPAFLSGEQKKAIVDLLFKTNRKVTVKQLKEDYFKKIECFDSVEISGVEDRFNASLGTYHDLLKIIKDKDFLDNEENEDILEDIVLTLTLFEDREMIEERLKTYAHLFDDKVMKQLKRRRYTGWGRLSRKLINGIRDKQSGKTILDFLKSDGFANRNFMQLIHDDSLTFKEDIQKAQVSGQGDSLHEHIANLAGSPAIKKGILQTVKVVDELVKVMGRHKPENIVIEMARENQTTQKGQKNSRERMKRIEEGIKELGSQILKEHPVENTQLQNEKLYLYYLQNGRDMYVDQELDINRLSDYDVDHIVPQSFLKDDSIDNKVLTRSDKARGKSDNVPSEEVVKKMKNYWRQLLNAKLITQRKFDNLTKAERGGLSELDKAGFIKRQLVETRQITKHVAQILDSRMNTKYDENDKLIREVKVITLKSKLVSDFRKDFQFYKVREINNYHHAHDAYLNAVVGTALIKKYPKLESEFVYGDYKVYDVRKMIAKSEQEIGKATAKYFFYSNIMNFFKTEITLANGEIRKRPLIETNGETGEIVWDKGRDFATVRKVLSMPQVNIVKKTEVQTGGFSKESILPKRNSDKLIARKKDWDPKKYGGFDSPTVAYSVLVVAKVEKGKSKKLKSVKELLGITIMERSSFEKNPIDFLEAKGYKEVKKDLIIKLPKYSLFELENGRKRMLASAGELQKGNELALPSKYVNFLYLASHYEKLKGSPEDNEQKQLFVEQHKHYLDEIIEQISEFSKRVILADANLDKVLSAYNKHRDKPIREQAENIIHLFTLTNLGAPAAFKYFDTTIDRKRYTSTKEVLDATLIHQSITGLYETRIDLSQLGGDGGPAPEAAAKGGMTAAIDILAPQQCAEPITWKSDEPVWVDQWPLTNDKLAAAQQLVQEQLEAGHITESSSPWNTPIFVIKKKSGKWRLLQDLRAVNATMVLMGALQPGLPSPVAIPQGYLKIIIDLKDCFFSIPLHPSDQKRFAFSLPSTNFKEPMQRFQWKVLPQGMANSPTLCQKYVATAIHKVRHAWKQMYIIHYMDDILIAGKDGQQVLQCFDQLKQELTAAGLHIAPEKVQLQDPYTYLGFELNGPKITNQKAVIRKDKLQTLNDFQKLLGDINWLRPYLKLTTGDLKPLFDTLKGDSDPNSHRSLSKEALASLEKVETAIAEQFVTHINYSLPLIFLIFNTALTPTGLFWQDNPIMWIHLPASPKKVLLPYYDAIADLIILGRDHSKKYFGIEPSTIIQPYSKSQIDWLMQNTEMWPIACASFVGILDNHYPPNKLIQFCKLHTFVFPQIISKTPLNNALLVFTDGSSTGMAAYTLTDTTIKFQTNLNSAQLVELQALIAVLSAFPNQPLNIYTDSAYLAHSIPLLETVAQIKHISETAKLFLQCQQLIYNRSIPFYIGHVRAHSGLPGPIAQGNQRADLATKIVASNINTAGKRTADGSEFEKRTADGSEFESPKKKAKVEGSGEGRGSLLTCGDVEENPG

SEQ ID NO: 3718 - protein, 2028 aa, synthetic construct
MPAAKRVKLDGGDKKYSIGLDIGTNSVGWAVITDEYKVPSKKFKVLGNTDRHSIKKNLIGALLFDSGETAEATRLKRTARRRYTRRKNRICYLQEIFSNEMAKVDDSFFHRLEESFLVEEDKKHERHPIFGNIVDEVAYHEKYPTIYHLRKKLVDSTDKADLRLIYLALAHMIKFRGHFLIEGDLNPDNSDVDKLFIQLVQTYNQLFEENPINASGVDAKAILSARLSKSRRLENLIAQLPGEKKNGLFGNLIALSLGLTPNFKSNFDLAEDAKLQLSKDTYDDDLDNLLAQIGDQYADLFLAAKNLSDAILLSDILRVNTEITKAPLSASMIKRYDEHHQDLTLLKALVRQQLPEKYKEIFFDQSKNGYAGYIDGGASQEEFYKFIKPILEKMDGTEELLVKLNREDLLRKQRTFDNGSIPHQIHLGELHAILRRQEDFYPFLKDNREKIEKILTFRIPYYVGPLARGNSRFAWMTRKSEETITPWNFEEVVDKGASAQSFIERMTNFDKNLPNEKVLPKHSLLYEYFTVYNELTKVKYVTEGMRKPAFLSGEQKKAIVDLLFKTNRKVTVKQLKEDYFKKIECFDSVEISGVEDRFNASLGTYHDLLKIIKDKDFLDNEENEDILEDIVLTLTLFEDREMIEERLKTYAHLFDDKVMKQLKRRRYTGWGRLSRKLINGIRDKQSGKTILDFLKSDGFANRNFMQLIHDDSLTFKEDIQKAQVSGQGDSLHEHIANLAGSPAIKKGILQTVKVVDELVKVMGRHKPENIVIEMARENQTTQKGQKNSRERMKRIEEGIKELGSQILKEHPVENTQLQNEKLYLYYLQNGRDMYVDQELDINRLSDYDVDHIVPQSFLKDDSIDNKVLTRSDKARGKSDNVPSEEVVKKMKNYWRQLLNAKLITQRKFDNLTKAERGGLSELDKAGFIKRQLVETRQITKHVAQILDSRMNTKYDENDKLIREVKVITLKSKLVSDFRKDFQFYKVREINNYHHAHDAYLNAVVGTALIKKYPKLESEFVYGDYKVYDVRKMIAKSEQEIGKATAKYFFYSNIMNFFKTEITLANGEIRKRPLIETNGETGEIVWDKGRDFATVRKVLSMPQVNIVKKTEVQTGGFSKESILPKRNSDKLIARKKDWDPKKYGGFDSPTVAYSVLVVAKVEKGKSKKLKSVKELLGITIMERSSFEKNPIDFLEAKGYKEVKKDLIIKLPKYSLFELENGRKRMLASAGELQKGNELALPSKYVNFLYLASHYEKLKGSPEDNEQKQLFVEQHKHYLDEIIEQISEFSKRVILADANLDKVLSAYNKHRDKPIREQAENIIHLFTLTNLGAPAAFKYFDTTIDRKRYTSTKEVLDATLIHQSITGLYETRIDLSQLGGDGGPAPGGGGGSGGMTAAIDILAPQQCAEPITWKSDEPVWVDQWPLTNDKLAAAQQLVQEQLEAGHITESSSPWNTPIFVIKKKSGKWRLLQDLRAVNATMVLMGALQPGLPSPVAIPQGYLKIIIDLKDCFFSIPLHPSDQKRFAFSLPSTNFKEPMQRFQWKVLPQGMANSPTLCQKYVATAIHKVRHAWKQMYIIHYMDDILIAGKDGQQVLQCFDQLKQELTAAGLHIAPEKVQLQDPYTYLGFELNGPKITNQKAVIRKDKLQTLNDFQKLLGDINWLRPYLKLTTGDLKPLFDTLKGDSDPNSHRSLSKEALASLEKVETAIAEQFVTHINYSLPLIFLIFNTALTPTGLFWQDNPIMWIHLPASPKKVLLPYYDAIADLIILGRDHSKKYFGIEPSTIIQPYSKSQIDWLMQNTEMWPIACASFVGILDNHYPPNKLIQFCKLHTFVFPQIISKTPLNNALLVFTDGSSTGMAAYTLTDTTIKFQTNLNSAQLVELQALIAVLSAFPNQPLNIYTDSAYLAHSIPLLETVAQIKHISETAKLFLQCQQLIYNRSIPFYIGHVRAHSGLPGPIAQGNQRADLATKIVASNINTAGKRTADGSEFEKRTADGSEFESPKKKAKVEGSGEGRGSLLTCGDVEENPG

SEQ ID NO: 3719 - protein, 2065 aa, synthetic construct
MPAAKRVKLDGGDKKYSIGLDIGTNSVGWAVITDEYKVPSKKFKVLGNTDRHSIKKNLIGALLFDSGETAEATRLKRTARRRYTRRKNRICYLQEIFSNEMAKVDDSFFHRLEESFLVEEDKKHERHPIFGNIVDEVAYHEKYPTIYHLRKKLVDSTDKADLRLIYLALAHMIKFRGHFLIEGDLNPDNSDVDKLFIQLVQTYNQLFEENPINASGVDAKAILSARLSKSRRLENLIAQLPGEKKNGLFGNLIALSLGLTPNFKSNFDLAEDAKLQLSKDTYDDDLDNLLAQIGDQYADLFLAAKNLSDAILLSDILRVNTEITKAPLSASMIKRYDEHHQDLTLLKALVRQQLPEKYKEIFFDQSKNGYAGYIDGGASQEEFYKFIKPILEKMDGTEELLVKLNREDLLRKQRTFDNGSIPHQIHLGELHAILRRQEDFYPFLKDNREKIEKILTFRIPYYVGPLARGNSRFAWMTRKSEETITPWNFEEVVDKGASAQSFIERMTNFDKNLPNEKVLPKHSLLYEYFTVYNELTKVKYVTEGMRKPAFLSGEQKKAIVDLLFKTNRKVTVKQLKEDYFKKIECFDSVEISGVEDRFNASLGTYHDLLKIIKDKDFLDNEENEDILEDIVLTLTLFEDREMIEERLKTYAHLFDDKVMKQLKRRRYTGWGRLSRKLINGIRDKQSGKTILDFLKSDGFANRNFMQLIHDDSLTFKEDIQKAQVSGQGDSLHEHIANLAGSPAIKKGILQTVKVVDELVKVMGRHKPENIVIEMARENQTTQKGQKNSRERMKRIEEGIKELGSQILKEHPVENTQLQNEKLYLYYLQNGRDMYVDQELDINRLSDYDVDHIVPQSFLKDDSIDNKVLTRSDKARGKSDNVPSEEVVKKMKNYWRQLLNAKLITQRKFDNLTKAERGGLSELDKAGFIKRQLVETRQITKHVAQILDSRMNTKYDENDKLIREVKVITLKSKLVSDFRKDFQFYKVREINNYHHAHDAYLNAVVGTALIKKYPKLESEFVYGDYKVYDVRKMIAKSEQEIGKATAKYFFYSNIMNFFKTEITLANGEIRKRPLIETNGETGEIVWDKGRDFATVRKVLSMPQVNIVKKTEVQTGGFSKESILPKRNSDKLIARKKDWDPKKYGGFDSPTVAYSVLVVAKVEKGKSKKLKSVKELLGITIMERSSFEKNPIDFLEAKGYKEVKKDLIIKLPKYSLFELENGRKRMLASAGELQKGNELALPSKYVNFLYLASHYEKLKGSPEDNEQKQLFVEQHKHYLDEIIEQISEFSKRVILADANLDKVLSAYNKHRDKPIREQAENIIHLFTLTNLGAPAAFKYFDTTIDRKRYTSTKEVLDATLIHQSITGLYETRIDLSQLGGDGGAEAAAKEAAAKEAAAKEAAAKALEAEAAAKEAAAKEAAAKEAAAKAGGMTAAIDILAPQQCAEPITWKSDEPVWVDQWPLTNDKLAAAQQLVQEQLEAGHITESSSPWNTPIFVIKKKSGKWRLLQDLRAVNATMVLMGALQPGLPSPVAIPQGYLKIIIDLKDCFFSIPLHPSDQKRFAFSLPSTNFKEPMQRFQWKVLPQGMANSPTLCQKYVATAIHKVRHAWKQMYIIHYMDDILIAGKDGQQVLQCFDQLKQELTAAGLHIAPEKVQLQDPYTYLGFELNGPKITNQKAVIRKDKLQTLNDFQKLLGDINWLRPYLKLTTGDLKPLFDTLKGDSDPNSHRSLSKEALASLEKVETAIAEQFVTHINYSLPLIFLIFNTALTPTGLFWQDNPIMWIHLPASPKKVLLPYYDAIADLIILGRDHSKKYFGIEPSTIIQPYSKSQIDWLMQNTEMWPIACASFVGILDNHYPPNKLIQFCKLHTFVFPQIISKTPLNNALLVFTDGSSTGMAAYTLTDTTIKFQTNLNSAQLVELQALIAVLSAFPNQPLNIYTDSAYLAHSIPLLETVAQIKHISETAKLFLQCQQLIYNRSIPFYIGHVRAHSGLPGPIAQGNQRADLATKIVASNINTAGKRTADGSEFEKRTADGSEFESPKKKAKVEGSGEGRGSLLTCGDVEENPG

SEQ ID NO: 3720 - protein, 2029 aa, synthetic construct
MAPKKKRKVGIHGVPAADKKYSIGLDIGTNSVGWAVITDEYKVPSKKFKVLGNTDRHSIKKNLIGALLFDSGETAEATRLKRTARRRYTRRKNRICYLQEIFSNEMAKVDDSFFHRLEESFLVEEDKKHERHPIFGNIVDEVAYHEKYPTIYHLRKKLVDSTDKADLRLIYLALAHMIKFRGHFLIEGDLNPDNSDVDKLFIQLVQTYNQLFEENPINASGVDAKAILSARLSKSRRLENLIAQLPGEKKNGLFGNLIALSLGLTPNFKSNFDLAEDAKLQLSKDTYDDDLDNLLAQIGDQYADLFLAAKNLSDAILLSDILRVNTEITKAPLSASMIKRYDEHHQDLTLLKALVRQQLPEKYKEIFFDQSKNGYAGYIDGGASQEEFYKFIKPILEKMDGTEELLVKLNREDLLRKQRTFDNGSIPHQIHLGELHAILRRQEDFYPFLKDNREKIEKILTFRIPYYVGPLARGNSRFAWMTRKSEETITPWNFEEVVDKGASAQSFIERMTNFDKNLPNEKVLPKHSLLYEYFTVYNELTKVKYVTEGMRKPAFLSGEQKKAIVDLLFKTNRKVTVKQLKEDYFKKIECFDSVEISGVEDRFNASLGTYHDLLKIIKDKDFLDNEENEDILEDIVLTLTLFEDREMIEERLKTYAHLFDDKVMKQLKRRRYTGWGRLSRKLINGIRDKQSGKTILDFLKSDGFANRNFMQLIHDDSLTFKEDIQKAQVSGQGDSLHEHIANLAGSPAIKKGILQTVKVVDELVKVMGRHKPENIVIEMARENQTTQKGQKNSRERMKRIEEGIKELGSQILKEHPVENTQLQNEKLYLYYLQNGRDMYVDQELDINRLSDYDVDHIVPQSFLKDDSIDNKVLTRSDKARGKSDNVPSEEVVKKMKNYWRQLLNAKLITQRKFDNLTKAERGGLSELDKAGFIKRQLVETRQITKHVAQILDSRMNTKYDENDKLIREVKVITLKSKLVSDFRKDFQFYKVREINNYHHAHDAYLNAVVGTALIKKYPKLESEFVYGDYKVYDVRKMIAKSEQEIGKATAKYFFYSNIMNFFKTEITLANGEIRKRPLIETNGETGEIVWDKGRDFATVRKVLSMPQVNIVKKTEVQTGGFSKESILPKRNSDKLIARKKDWDPKKYGGFDSPTVAYSVLVVAKVEKGKSKKLKSVKELLGITIMERSSFEKNPIDFLEAKGYKEVKKDLIIKLPKYSLFELENGRKRMLASAGELQKGNELALPSKYVNFLYLASHYEKLKGSPEDNEQKQLFVEQHKHYLDEIIEQISEFSKRVILADANLDKVLSAYNKHRDKPIREQAENIIHLFTLTNLGAPAAFKYFDTTIDRKRYTSTKEVLDATLIHQSITGLYETRIDLSQLGGDSGGSSGGSSGSETPGTSESATPESSGGSSGGSSNQVGHRRIEPHKIATGALKPRPQKQYHINPRAKADIQIVIDDLLRQGVLRQQNSEMNTPVYPVPKADGRWRMVLDYREVNKVTPLVATQNCHSASILNTLYRGPYKSTLDLANGFWAHPIKPEDYWITAFTWGGKTYCWTVLPQGFLNSPALFNADVVDILKDIPNVQVYVDDVYVSSATEQEHLDILETIFNRLSTAGYIVSLKKSKLAKETVEFLGFSISQNGRGLTDSYKQKLMDLQPPTTLRQLQSILGKINFARNFLPNFAELVAPLYQLIPKAKGQCIPWTMDHTTQLKTIIQALNSTENLEERRPDVDLIMKVHISNTAGYIRFYNHGGQKPIAYNNALFTSTELKFTPTEKIMATIHKGLLKALDLSLGKEIHVYSAIASMTKLQKTPLSERKALSIRWLKWQTYFEDPRIKFHHDATLPDLQNLPVPQQDTGKEMTILPLLHYEAIFYTDGSAIRSPKPNKTHSAGMGIIQAKFEPDFRIVHLWSFPLGDHTAQYAEIAAFEFAIRRATGIRGPVLIVTDSNYVAKSYNEELPYWESNGFVNNKKKTLKHISKWKAIAECKNLKADIHVIHEPGHQPAEASPHAQGNALADKQAVSGSYKVFS

SEQ ID NO: 3721 - protein, 2052 aa, synthetic construct
MKRTADGSEFESPKKKRKVDKKYSIGLDIGTNSVGWAVITDEYKVPSKKFKVLGNTDRHSIKKNLIGALLFDSGETAEATRLKRTARRRYTRRKNRICYLQEIFSNEMAKVDDSFFHRLEESFLVEEDKKHERHPIFGNIVDEVAYHEKYPTIYHLRKKLVDSTDKADLRLIYLALAHMIKFRGHFLIEGDLNPDNSDVDKLFIQLVQTYNQLFEENPINASGVDAKAILSARLSKSRRLENLIAQLPGEKKNGLFGNLIALSLGLTPNFKSNFDLAEDAKLQLSKDTYDDDLDNLLAQIGDQYADLFLAAKNLSDAILLSDILRVNTEITKAPLSASMIKRYDEHHQDLTLLKALVRQQLPEKYKEIFFDQSKNGYAGYIDGGASQEEFYKFIKPILEKMDGTEELLVKLNREDLLRKQRTFDNGSIPHQIHLGELHAILRRQEDFYPFLKDNREKIEKILTFRIPYYVGPLARGNSRFAWMTRKSEETITPWNFEEVVDKGASAQSFIERMTNFDKNLPNEKVLPKHSLLYEYFTVYNELTKVKYVTEGMRKPAFLSGEQKKAIVDLLFKTNRKVTVKQLKEDYFKKIECFDSVEISGVEDRFNASLGTYHDLLKIIKDKDFLDNEENEDILEDIVLTLTLFEDREMIEERLKTYAHLFDDKVMKQLKRRRYTGWGRLSRKLINGIRDKQSGKTILDFLKSDGFANRNFMQLIHDDSLTFKEDIQKAQVSGQGDSLHEHIANLAGSPAIKKGILQTVKVVDELVKVMGRHKPENIVIEMARENQTTQKGQKNSRERMKRIEEGIKELGSQILKEHPVENTQLQNEKLYLYYLQNGRDMYVDQELDINRLSDYDVDHIVPQSFLKDDSIDNKVLTRSDKARGKSDNVPSEEVVKKMKNYWRQLLNAKLITQRKFDNLTKAERGGLSELDKAGFIKRQLVETRQITKHVAQILDSRMNTKYDENDKLIREVKVITLKSKLVSDFRKDFQFYKVREINNYHHAHDAYLNAVVGTALIKKYPKLESEFVYGDYKVYDVRKMIAKSEQEIGKATAKYFFYSNIMNFFKTEITLANGEIRKRPLIETNGETGEIVWDKGRDFATVRKVLSMPQVNIVKKTEVQTGGFSKESILPKRNSDKLIARKKDWDPKKYGGFDSPTVAYSVLVVAKVEKGKSKKLKSVKELLGITIMERSSFEKNPIDFLEAKGYKEVKKDLIIKLPKYSLFELENGRKRMLASAGELQKGNELALPSKYVNFLYLASHYEKLKGSPEDNEQKQLFVEQHKHYLDEIIEQISEFSKRVILADANLDKVLSAYNKHRDKPIREQAENIIHLFTLTNLGAPAAFKYFDTTIDRKRYTSTKEVLDATLIHQSITGLYETRIDLSQLGGDSGGSSGGSSGSETPGTSESATPESSGGSSGGSSNQVGHRRIEPHKIATGALKPRPQKQYHINPRAKADIQIVIDDLLRQGVLRQQNSEMNTPVYPVPKADGRWRMVLDYREVNKVTPLVATQNCHSASILNTLYRGPYKSTLDLANGFWAHPIKPEDYWITAFTWGGKTYCWTVLPQGFLNSPALFNADVVDILKDIPNVQVYVDDVYVSSATEQEHLDILETIFNRLSTAGYIVSLKKSKLAKETVEFLGFSISQNGRGLTDSYKQKLMDLQPPTTLRQLQSILGKINFARNFLPNFAELVAPLYQLIPKAKGQCIPWTMDHTTQLKTIIQALNSTENLEERRPDVDLIMKVHISNTAGYIRFYNHGGQKPIAYNNALFTSTELKFTPTEKIMATIHKGLLKALDLSLGKEIHVYSAIASMTKLQKTPLSERKALSIRWLKWQTYFEDPRIKFHHDATLPDLQNLPVPQQDTGKEMTILPLLHYEAIFYTDGSAIRSPKPNKTHSAGMGIIQAKFEPDFRIVHLWSFPLGDHTAQYAEIAAFEFAIRRATGIRGPVLIVTDSNYVAKSYNEELPYWESNGFVNNKKKTLKHISKWKAIAECKNLKADIHVIHEPGHQPAEASPHAQGNALADKQAVSGSYKVFSSGGSKRTADGSEFEPKKKRKV

SEQ ID NO: 3722 - protein, 2057 aa, synthetic construct
MPAAKRVKLDGGDKKYSIGLDIGTNSVGWAVITDEYKVPSKKFKVLGNTDRHSIKKNLIGALLFDSGETAEATRLKRTARRRYTRRKNRICYLQEIFSNEMAKVDDSFFHRLEESFLVEEDKKHERHPIFGNIVDEVAYHEKYPTIYHLRKKLVDSTDKADLRLIYLALAHMIKFRGHFLIEGDLNPDNSDVDKLFIQLVQTYNQLFEENPINASGVDAKAILSARLSKSRRLENLIAQLPGEKKNGLFGNLIALSLGLTPNFKSNFDLAEDAKLQLSKDTYDDDLDNLLAQIGDQYADLFLAAKNLSDAILLSDILRVNTEITKAPLSASMIKRYDEHHQDLTLLKALVRQQLPEKYKEIFFDQSKNGYAGYIDGGASQEEFYKFIKPILEKMDGTEELLVKLNREDLLRKQRTFDNGSIPHQIHLGELHAILRRQEDFYPFLKDNREKIEKILTFRIPYYVGPLARGNSRFAWMTRKSEETITPWNFEEVVDKGASAQSFIERMTNFDKNLPNEKVLPKHSLLYEYFTVYNELTKVKYVTEGMRKPAFLSGEQKKAIVDLLFKTNRKVTVKQLKEDYFKKIECFDSVEISGVEDRFNASLGTYHDLLKIIKDKDFLDNEENEDILEDIVLTLTLFEDREMIEERLKTYAHLFDDKVMKQLKRRRYTGWGRLSRKLINGIRDKQSGKTILDFLKSDGFANRNFMQLIHDDSLTFKEDIQKAQVSGQGDSLHEHIANLAGSPAIKKGILQTVKVVDELVKVMGRHKPENIVIEMARENQTTQKGQKNSRERMKRIEEGIKELGSQILKEHPVENTQLQNEKLYLYYLQNGRDMYVDQELDINRLSDYDVDHIVPQSFLKDDSIDNKVLTRSDKARGKSDNVPSEEVVKKMKNYWRQLLNAKLITQRKFDNLTKAERGGLSELDKAGFIKRQLVETRQITKHVAQILDSRMNTKYDENDKLIREVKVITLKSKLVSDFRKDFQFYKVREINNYHHAHDAYLNAVVGTALIKKYPKLESEFVYGDYKVYDVRKMIAKSEQEIGKATAKYFFYSNIMNFFKTEITLANGEIRKRPLIETNGETGEIVWDKGRDFATVRKVLSMPQVNIVKKTEVQTGGFSKESILPKRNSDKLIARKKDWDPKKYGGFDSPTVAYSVLVVAKVEKGKSKKLKSVKELLGITIMERSSFEKNPIDFLEAKGYKEVKKDLIIKLPKYSLFELENGRKRMLASAGELQKGNELALPSKYVNFLYLASHYEKLKGSPEDNEQKQLFVEQHKHYLDEIIEQISEFSKRVILADANLDKVLSAYNKHRDKPIREQAENIIHLFTLTNLGAPAAFKYFDTTIDRKRYTSTKEVLDATLIHQSITGLYETRIDLSQLGGDSGGSSGGSSGSETPGTSESATPESSGGSSGGSSNQVGHRRIEPHKIATGALKPRPQKQYHINPRAKADIQIVIDDLLRQGVLRQQNSEMNTPVYPVPKADGRWRMVLDYREVNKVTPLVATQNCHSASILNTLYRGPYKSTLDLANGFWAHPIKPEDYWITAFTWGGKTYCWTVLPQGFLNSPALFNADVVDILKDIPNVQVYVDDVYVSSATEQEHLDILETIFNRLSTAGYIVSLKKSKLAKETVEFLGFSISQNGRGLTDSYKQKLMDLQPPTTLRQLQSILGKINFARNFLPNFAELVAPLYQLIPKAKGQCIPWTMDHTTQLKTIIQALNSTENLEERRPDVDLIMKVHISNTAGYIRFYNHGGQKPIAYNNALFTSTELKFTPTEKIMATIHKGLLKALDLSLGKEIHVYSAIASMTKLQKTPLSERKALSIRWLKWQTYFEDPRIKFHHDATLPDLQNLPVPQQDTGKEMTILPLLHYEAIFYTDGSAIRSPKPNKTHSAGMGIIQAKFEPDFRIVHLWSFPLGDHTAQYAEIAAFEFAIRRATGIRGPVLIVTDSNYVAKSYNEELPYWESNGFVNNKKKTLKHISKWKAIAECKNLKADIHVIHEPGHQPAEASPHAQGNALADKQAVSGSYKVFSSGGSKRTADGSEFEKRTADGSEFESPKKKAKVE

SEQ ID NO: 3723 - protein, 1993 aa, synthetic construct
MAPKKKRKVGIHGVPAADKKYSIGLDIGTNSVGWAVITDEYKVPSKKFKVLGNTDRHSIKKNLIGALLFDSGETAEATRLKRTARRRYTRRKNRICYLQEIFSNEMAKVDDSFFHRLEESFLVEEDKKHERHPIFGNIVDEVAYHEKYPTIYHLRKKLVDSTDKADLRLIYLALAHMIKFRGHFLIEGDLNPDNSDVDKLFIQLVQTYNQLFEENPINASGVDAKAILSARLSKSRRLENLIAQLPGEKKNGLFGNLIALSLGLTPNFKSNFDLAEDAKLQLSKDTYDDDLDNLLAQIGDQYADLFLAAKNLSDAILLSDILRVNTEITKAPLSASMIKRYDEHHQDLTLLKALVRQQLPEKYKEIFFDQSKNGYAGYIDGGASQEEFYKFIKPILEKMDGTEELLVKLNREDLLRKQRTFDNGSIPHQIHLGELHAILRRQEDFYPFLKDNREKIEKILTFRIPYYVGPLARGNSRFAWMTRKSEETITPWNFEEVVDKGASAQSFIERMTNFDKNLPNEKVLPKHSLLYEYFTVYNELTKVKYVTEGMRKPAFLSGEQKKAIVDLLFKTNRKVTVKQLKEDYFKKIECFDSVEISGVEDRFNASLGTYHDLLKIIKDKDFLDNEENEDILEDIVLTLTLFEDREMIEERLKTYAHLFDDKVMKQLKRRRYTGWGRLSRKLINGIRDKQSGKTILDFLKSDGFANRNFMQLIHDDSLTFKEDIQKAQVSGQGDSLHEHIANLAGSPAIKKGILQTVKVVDELVKVMGRHKPENIVIEMARENQTTQKGQKNSRERMKRIEEGIKELGSQILKEHPVENTQLQNEKLYLYYLQNGRDMYVDQELDINRLSDYDVDHIVPQSFLKDDSIDNKVLTRSDKARGKSDNVPSEEVVKKMKNYWRQLLNAKLITQRKFDNLTKAERGGLSELDKAGFIKRQLVETRQITKHVAQILDSRMNTKYDENDKLIREVKVITLKSKLVSDFRKDFQFYKVREINNYHHAHDAYLNAVVGTALIKKYPKLESEFVYGDYKVYDVRKMIAKSEQEIGKATAKYFFYSNIMNFFKTEITLANGEIRKRPLIETNGETGEIVWDKGRDFATVRKVLSMPQVNIVKKTEVQTGGFSKESILPKRNSDKLIARKKDWDPKKYGGFDSPTVAYSVLVVAKVEKGKSKKLKSVKELLGITIMERSSFEKNPIDFLEAKGYKEVKKDLIIKLPKYSLFELENGRKRMLASAGELQKGNELALPSKYVNFLYLASHYEKLKGSPEDNEQKQLFVEQHKHYLDEIIEQISEFSKRVILADANLDKVLSAYNKHRDKPIREQAENIIHLFTLTNLGAPAAFKYFDTTIDRKRYTSTKEVLDATLIHQSITGLYETRIDLSQLGGDSGGSSGGSSGSETPGTSESATPESSGGSSGGSSVLDTPPSHIGLEHLPPPPEVPQFPLNLERLQALQDLVHRSLEAGYISPWDGPGNNPVFPVRKPNGAWRFVHDLRATNALTKPIPALSPGPPDLTAIPTHPPHIICLDLKDAFFQIPVEDRFRFYLSFTLPSPGGLQPHRRFAWRVLPQGFINSPALFERALQEPLRQVSAAFSQSLLVSYMDDILYASPTEEQRSQCYQALAARLRDLGFQVASEKTSQTPSPVPFLGQMVHEQIVTYQSLPTLQISSPISLHQLQAVLGDLQWVSRGTPTTRRPLQLLYSSLKRHHDPRAIIQLSPEQLQGIAELRQALSHNARSRYNEQEPLLAYVHLTRAGSTLVLFQKGAQFPLAYFQTPLTDNQASPWGLLLLLGCQYLQTQALSSYAKPILKYYHNLPKTSLDNWIQSSEDPRVQELLQLWPQISSQGIQPPGPWKTLITRAEVFLTPQFSPDPIPAALCLFSDGATGRGAYCLWKDHLLDFQAVPAPESAQKGELAGLLAGLAAAPPEPVNIWVDSKYLYSLLRTLVLGAWLQPDPVPSYALLYKSLLRHPAIVVGHVRSHSSASHPIASLNNYVDQLL

SEQ ID NO: 3724 - protein, 2016 aa, synthetic construct
MKRTADGSEFESPKKKRKVDKKYSIGLDIGTNSVGWAVITDEYKVPSKKFKVLGNTDRHSIKKNLIGALLFDSGETAEATRLKRTARRRYTRRKNRICYLQEIFSNEMAKVDDSFFHRLEESFLVEEDKKHERHPIFGNIVDEVAYHEKYPTIYHLRKKLVDSTDKADLRLIYLALAHMIKFRGHFLIEGDLNPDNSDVDKLFIQLVQTYNQLFEENPINASGVDAKAILSARLSKSRRLENLIAQLPGEKKNGLFGNLIALSLGLTPNFKSNFDLAEDAKLQLSKDTYDDDLDNLLAQIGDQYADLFLAAKNLSDAILLSDILRVNTEITKAPLSASMIKRYDEHHQDLTLLKALVRQQLPEKYKEIFFDQSKNGYAGYIDGGASQEEFYKFIKPILEKMDGTEELLVKLNREDLLRKQRTFDNGSIPHQIHLGELHAILRRQEDFYPFLKDNREKIEKILTFRIPYYVGPLARGNSRFAWMTRKSEETITPWNFEEVVDKGASAQSFIERMTNFDKNLPNEKVLPKHSLLYEYFTVYNELTKVKYVTEGMRKPAFLSGEQKKAIVDLLFKTNRKVTVKQLKEDYFKKIECFDSVEISGVEDRFNASLGTYHDLLKIIKDKDFLDNEENEDILEDIVLTLTLFEDREMIEERLKTYAHLFDDKVMKQLKRRRYTGWGRLSRKLINGIRDKQSGKTILDFLKSDGFANRNFMQLIHDDSLTFKEDIQKAQVSGQGDSLHEHIANLAGSPAIKKGILQTVKVVDELVKVMGRHKPENIVIEMARENQTTQKGQKNSRERMKRIEEGIKELGSQILKEHPVENTQLQNEKLYLYYLQNGRDMYVDQELDINRLSDYDVDHIVPQSFLKDDSIDNKVLTRSDKARGKSDNVPSEEVVKKMKNYWRQLLNAKLITQRKFDNLTKAERGGLSELDKAGFIKRQLVETRQITKHVAQILDSRMNTKYDENDKLIREVKVITLKSKLVSDFRKDFQFYKVREINNYHHAHDAYLNAVVGTALIKKYPKLESEFVYGDYKVYDVRKMIAKSEQEIGKATAKYFFYSNIMNFFKTEITLANGEIRKRPLIETNGETGEIVWDKGRDFATVRKVLSMPQVNIVKKTEVQTGGFSKESILPKRNSDKLIARKKDWDPKKYGGFDSPTVAYSVLVVAKVEKGKSKKLKSVKELLGITIMERSSFEKNPIDFLEAKGYKEVKKDLIIKLPKYSLFELENGRKRMLASAGELQKGNELALPSKYVNFLYLASHYEKLKGSPEDNEQKQLFVEQHKHYLDEIIEQISEFSKRVILADANLDKVLSAYNKHRDKPIREQAENIIHLFTLTNLGAPAAFKYFDTTIDRKRYTSTKEVLDATLIHQSITGLYETRIDLSQLGGDSGGSSGGSSGSETPGTSESATPESSGGSSGGSSVLDTPPSHIGLEHLPPPPEVPQFPLNLERLQALQDLVHRSLEAGYISPWDGPGNNPVFPVRKPNGAWRFVHDLRATNALTKPIPALSPGPPDLTAIPTHPPHIICLDLKDAFFQIPVEDRFRFYLSFTLPSPGGLQPHRRFAWRVLPQGFINSPALFERALQEPLRQVSAAFSQSLLVSYMDDILYASPTEEQRSQCYQALAARLRDLGFQVASEKTSQTPSPVPFLGQMVHEQIVTYQSLPTLQISSPISLHQLQAVLGDLQWVSRGTPTTRRPLQLLYSSLKRHHDPRAIIQLSPEQLQGIAELRQALSHNARSRYNEQEPLLAYVHLTRAGSTLVLFQKGAQFPLAYFQTPLTDNQASPWGLLLLLGCQYLQTQALSSYAKPILKYYHNLPKTSLDNWIQSSEDPRVQELLQLWPQISSQGIQPPGPWKTLITRAEVFLTPQFSPDPIPAALCLFSDGATGRGAYCLWKDHLLDFQAVPAPESAQKGELAGLLAGLAAAPPEPVNIWVDSKYLYSLLRTLVLGAWLQPDPVPSYALLYKSLLRHPAIVVGHVRSHSSASHPIASLNNYVDQLLSGGSKRTADGSEFEPKKKRKV

SEQ ID NO: 3725 - protein, 2021 aa, synthetic construct
MPAAKRVKLDGGDKKYSIGLDIGTNSVGWAVITDEYKVPSKKFKVLGNTDRHSIKKNLIGALLFDSGETAEATRLKRTARRRYTRRKNRICYLQEIFSNEMAKVDDSFFHRLEESFLVEEDKKHERHPIFGNIVDEVAYHEKYPTIYHLRKKLVDSTDKADLRLIYLALAHMIKFRGHFLIEGDLNPDNSDVDKLFIQLVQTYNQLFEENPINASGVDAKAILSARLSKSRRLENLIAQLPGEKKNGLFGNLIALSLGLTPNFKSNFDLAEDAKLQLSKDTYDDDLDNLLAQIGDQYADLFLAAKNLSDAILLSDILRVNTEITKAPLSASMIKRYDEHHQDLTLLKALVRQQLPEKYKEIFFDQSKNGYAGYIDGGASQEEFYKFIKPILEKMDGTEELLVKLNREDLLRKQRTFDNGSIPHQIHLGELHAILRRQEDFYPFLKDNREKIEKILTFRIPYYVGPLARGNSRFAWMTRKSEETITPWNFEEVVDKGASAQSFIERMTNFDKNLPNEKVLPKHSLLYEYFTVYNELTKVKYVTEGMRKPAFLSGEQKKAIVDLLFKTNRKVTVKQLKEDYFKKIECFDSVEISGVEDRFNASLGTYHDLLKIIKDKDFLDNEENEDILEDIVLTLTLFEDREMIEERLKTYAHLFDDKVMKQLKRRRYTGWGRLSRKLINGIRDKQSGKTILDFLKSDGFANRNFMQLIHDDSLTFKEDIQKAQVSGQGDSLHEHIANLAGSPAIKKGILQTVKVVDELVKVMGRHKPENIVIEMARENQTTQKGQKNSRERMKRIEEGIKELGSQILKEHPVENTQLQNEKLYLYYLQNGRDMYVDQELDINRLSDYDVDHIVPQSFLKDDSIDNKVLTRSDKARGKSDNVPSEEVVKKMKNYWRQLLNAKLITQRKFDNLTKAERGGLSELDKAGFIKRQLVETRQITKHVAQILDSRMNTKYDENDKLIREVKVITLKSKLVSDFRKDFQFYKVREINNYHHAHDAYLNAVVGTALIKKYPKLESEFVYGDYKVYDVRKMIAKSEQEIGKATAKYFFYSNIMNFFKTEITLANGEIRKRPLIETNGETGEIVWDKGRDFATVRKVLSMPQVNIVKKTEVQTGGFSKESILPKRNSDKLIARKKDWDPKKYGGFDSPTVAYSVLVVAKVEKGKSKKLKSVKELLGITIMERSSFEKNPIDFLEAKGYKEVKKDLIIKLPKYSLFELENGRKRMLASAGELQKGNELALPSKYVNFLYLASHYEKLKGSPEDNEQKQLFVEQHKHYLDEIIEQISEFSKRVILADANLDKVLSAYNKHRDKPIREQAENIIHLFTLTNLGAPAAFKYFDTTIDRKRYTSTKEVLDATLIHQSITGLYETRIDLSQLGGDSGGSSGGSSGSETPGTSESATPESSGGSSGGSSVLDTPPSHIGLEHLPPPPEVPQFPLNLERLQALQDLVHRSLEAGYISPWDGPGNNPVFPVRKPNGAWRFVHDLRATNALTKPIPALSPGPPDLTAIPTHPPHIICLDLKDAFFQIPVEDRFRFYLSFTLPSPGGLQPHRRFAWRVLPQGFINSPALFERALQEPLRQVSAAFSQSLLVSYMDDILYASPTEEQRSQCYQALAARLRDLGFQVASEKTSQTPSPVPFLGQMVHEQIVTYQSLPTLQISSPISLHQLQAVLGDLQWVSRGTPTTRRPLQLLYSSLKRHHDPRAIIQLSPEQLQGIAELRQALSHNARSRYNEQEPLLAYVHLTRAGSTLVLFQKGAQFPLAYFQTPLTDNQASPWGLLLLLGCQYLQTQALSSYAKPILKYYHNLPKTSLDNWIQSSEDPRVQELLQLWPQISSQGIQPPGPWKTLITRAEVFLTPQFSPDPIPAALCLFSDGATGRGAYCLWKDHLLDFQAVPAPESAQKGELAGLLAGLAAAPPEPVNIWVDSKYLYSLLRTLVLGAWLQPDPVPSYALLYKSLLRHPAIVVGHVRSHSSASHPIASLNNYVDQLLSGGSKRTADGSEFEKRTADGSEFESPKKKAKVE

SEQ ID NO: 3726 - protein, 2043 aa, synthetic construct
MPAAKRVKLDGGDKKYSIGLDIGTNSVGWAVITDEYKVPSKKFKVLGNTDRHSIKKNLIGALLFDSGETAEATRLKRTARRRYTRRKNRICYLQEIFSNEMAKVDDSFFHRLEESFLVEEDKKHERHPIFGNIVDEVAYHEKYPTIYHLRKKLVDSTDKADLRLIYLALAHMIKFRGHFLIEGDLNPDNSDVDKLFIQLVQTYNQLFEENPINASGVDAKAILSARLSKSRRLENLIAQLPGEKKNGLFGNLIALSLGLTPNFKSNFDLAEDAKLQLSKDTYDDDLDNLLAQIGDQYADLFLAAKNLSDAILLSDILRVNTEITKAPLSASMIKRYDEHHQDLTLLKALVRQQLPEKYKEIFFDQSKNGYAGYIDGGASQEEFYKFIKPILEKMDGTEELLVKLNREDLLRKQRTFDNGSIPHQIHLGELHAILRRQEDFYPFLKDNREKIEKILTFRIPYYVGPLARGNSRFAWMTRKSEETITPWNFEEVVDKGASAQSFIERMTNFDKNLPNEKVLPKHSLLYEYFTVYNELTKVKYVTEGMRKPAFLSGEQKKAIVDLLFKTNRKVTVKQLKEDYFKKIECFDSVEISGVEDRFNASLGTYHDLLKIIKDKDFLDNEENEDILEDIVLTLTLFEDREMIEERLKTYAHLFDDKVMKQLKRRRYTGWGRLSRKLINGIRDKQSGKTILDFLKSDGFANRNFMQLIHDDSLTFKEDIQKAQVSGQGDSLHEHIANLAGSPAIKKGILQTVKVVDELVKVMGRHKPENIVIEMARENQTTQKGQKNSRERMKRIEEGIKELGSQILKEHPVENTQLQNEKLYLYYLQNGRDMYVDQELDINRLSDYDVDHIVPQSFLKDDSIDNKVLTRSDKARGKSDNVPSEEVVKKMKNYWRQLLNAKLITQRKFDNLTKAERGGLSELDKAGFIKRQLVETRQITKHVAQILDSRMNTKYDENDKLIREVKVITLKSKLVSDFRKDFQFYKVREINNYHHAHDAYLNAVVGTALIKKYPKLESEFVYGDYKVYDVRKMIAKSEQEIGKATAKYFFYSNIMNFFKTEITLANGEIRKRPLIETNGETGEIVWDKGRDFATVRKVLSMPQVNIVKKTEVQTGGFSKESILPKRNSDKLIARKKDWDPKKYGGFDSPTVAYSVLVVAKVEKGKSKKLKSVKELLGITIMERSSFEKNPIDFLEAKGYKEVKKDLIIKLPKYSLFELENGRKRMLASAGELQKGNELALPSKYVNFLYLASHYEKLKGSPEDNEQKQLFVEQHKHYLDEIIEQISEFSKRVILADANLDKVLSAYNKHRDKPIREQAENIIHLFTLTNLGAPAAFKYFDTTIDRKRYTSTKEVLDATLIHQSITGLYETRIDLSQLGGDGGSGGSSGGSSGSETPGTSESATPESSGGSSGGSSGGGVLDTPPSHIGLEHLPPPPEVPQFPLNLERLQALQDLVHRSLEAGYISPWDGPGNNPVFPVRKPNGAWRFVHDLRATNALTKPIPALSPGPPDLTAIPTHPPHIICLDLKDAFFQIPVEDRFRFYLSFTLPSPGGLQPHRRFAWRVLPQGFINSPALFERALQEPLRQVSAAFSQSLLVSYMDDILYASPTEEQRSQCYQALAARLRDLGFQVASEKTSQTPSPVPFLGQMVHEQIVTYQSLPTLQISSPISLHQLQAVLGDLQWVSRGTPTTRRPLQLLYSSLKRHHDPRAIIQLSPEQLQGIAELRQALSHNARSRYNEQEPLLAYVHLTRAGSTLVLFQKGAQFPLAYFQTPLTDNQASPWGLLLLLGCQYLQTQALSSYAKPILKYYHNLPKTSLDNWIQSSEDPRVQELLQLWPQISSQGIQPPGPWKTLITRAEVFLTPQFSPDPIPAALCLFSDGATGRGAYCLWKDHLLDFQAVPAPESAQKGELAGLLAGLAAAPPEPVNIWVDSKYLYSLLRTLVLGAWLQPDPVPSYALLYKSLLRHPAIVVGHVRSHSSASHPIASLNNYVDQLAGKRTADGSEFEKRTADGSEFESPKKKAKVEGSGEGRGSLLTCGDVEENPG

SEQ ID NO: 3727 - protein, 2021 aa, synthetic construct
MPAAKRVKLDGGDKKYSIGLDIGTNSVGWAVITDEYKVPSKKFKVLGNTDRHSIKKNLIGALLFDSGETAEATRLKRTARRRYTRRKNRICYLQEIFSNEMAKVDDSFFHRLEESFLVEEDKKHERHPIFGNIVDEVAYHEKYPTIYHLRKKLVDSTDKADLRLIYLALAHMIKFRGHFLIEGDLNPDNSDVDKLFIQLVQTYNQLFEENPINASGVDAKAILSARLSKSRRLENLIAQLPGEKKNGLFGNLIALSLGLTPNFKSNFDLAEDAKLQLSKDTYDDDLDNLLAQIGDQYADLFLAAKNLSDAILLSDILRVNTEITKAPLSASMIKRYDEHHQDLTLLKALVRQQLPEKYKEIFFDQSKNGYAGYIDGGASQEEFYKFIKPILEKMDGTEELLVKLNREDLLRKQRTFDNGSIPHQIHLGELHAILRRQEDFYPFLKDNREKIEKILTFRIPYYVGPLARGNSRFAWMTRKSEETITPWNFEEVVDKGASAQSFIERMTNFDKNLPNEKVLPKHSLLYEYFTVYNELTKVKYVTEGMRKPAFLSGEQKKAIVDLLFKTNRKVTVKQLKEDYFKKIECFDSVEISGVEDRFNASLGTYHDLLKIIKDKDFLDNEENEDILEDIVLTLTLFEDREMIEERLKTYAHLFDDKVMKQLKRRRYTGWGRLSRKLINGIRDKQSGKTILDFLKSDGFANRNFMQLIHDDSLTFKEDIQKAQVSGQGDSLHEHIANLAGSPAIKKGILQTVKVVDELVKVMGRHKPENIVIEMARENQTTQKGQKNSRERMKRIEEGIKELGSQILKEHPVENTQLQNEKLYLYYLQNGRDMYVDQELDINRLSDYDVDHIVPQSFLKDDSIDNKVLTRSDKARGKSDNVPSEEVVKKMKNYWRQLLNAKLITQRKFDNLTKAERGGLSELDKAGFIKRQLVETRQITKHVAQILDSRMNTKYDENDKLIREVKVITLKSKLVSDFRKDFQFYKVREINNYHHAHDAYLNAVVGTALIKKYPKLESEFVYGDYKVYDVRKMIAKSEQEIGKATAKYFFYSNIMNFFKTEITLANGEIRKRPLIETNGETGEIVWDKGRDFATVRKVLSMPQVNIVKKTEVQTGGFSKESILPKRNSDKLIARKKDWDPKKYGGFDSPTVAYSVLVVAKVEKGKSKKLKSVKELLGITIMERSSFEKNPIDFLEAKGYKEVKKDLIIKLPKYSLFELENGRKRMLASAGELQKGNELALPSKYVNFLYLASHYEKLKGSPEDNEQKQLFVEQHKHYLDEIIEQISEFSKRVILADANLDKVLSAYNKHRDKPIREQAENIIHLFTLTNLGAPAAFKYFDTTIDRKRYTSTKEVLDATLIHQSITGLYETRIDLSQLGGDGGGGGEAAAKPAPGGGVLDTPPSHIGLEHLPPPPEVPQFPLNLERLQALQDLVHRSLEAGYISPWDGPGNNPVFPVRKPNGAWRFVHDLRATNALTKPIPALSPGPPDLTAIPTHPPHIICLDLKDAFFQIPVEDRFRFYLSFTLPSPGGLQPHRRFAWRVLPQGFINSPALFERALQEPLRQVSAAFSQSLLVSYMDDILYASPTEEQRSQCYQALAARLRDLGFQVASEKTSQTPSPVPFLGQMVHEQIVTYQSLPTLQISSPISLHQLQAVLGDLQWVSRGTPTTRRPLQLLYSSLKRHHDPRAIIQLSPEQLQGIAELRQALSHNARSRYNEQEPLLAYVHLTRAGSTLVLFQKGAQFPLAYFQTPLTDNQASPWGLLLLLGCQYLQTQALSSYAKPILKYYHNLPKTSLDNWIQSSEDPRVQELLQLWPQISSQGIQPPGPWKTLITRAEVFLTPQFSPDPIPAALCLFSDGATGRGAYCLWKDHLLDFQAVPAPESAQKGELAGLLAGLAAAPPEPVNIWVDSKYLYSLLRTLVLGAWLQPDPVPSYALLYKSLLRHPAIVVGHVRSHSSASHPIASLNNYVDQLAGKRTADGSEFEKRTADGSEFESPKKKAKVEGSGEGRGSLLTCGDVEENPG

SEQ ID NO: 3728 - protein, 2013 aa, synthetic construct
MPAAKRVKLDGGDKKYSIGLDIGTNSVGWAVITDEYKVPSKKFKVLGNTDRHSIKKNLIGALLFDSGETAEATRLKRTARRRYTRRKNRICYLQEIFSNEMAKVDDSFFHRLEESFLVEEDKKHERHPIFGNIVDEVAYHEKYPTIYHLRKKLVDSTDKADLRLIYLALAHMIKFRGHFLIEGDLNPDNSDVDKLFIQLVQTYNQLFEENPINASGVDAKAILSARLSKSRRLENLIAQLPGEKKNGLFGNLIALSLGLTPNFKSNFDLAEDAKLQLSKDTYDDDLDNLLAQIGDQYADLFLAAKNLSDAILLSDILRVNTEITKAPLSASMIKRYDEHHQDLTLLKALVRQQLPEKYKEIFFDQSKNGYAGYIDGGASQEEFYKFIKPILEKMDGTEELLVKLNREDLLRKQRTFDNGSIPHQIHLGELHAILRRQEDFYPFLKDNREKIEKILTFRIPYYVGPLARGNSRFAWMTRKSEETITPWNFEEVVDKGASAQSFIERMTNFDKNLPNEKVLPKHSLLYEYFTVYNELTKVKYVTEGMRKPAFLSGEQKKAIVDLLFKTNRKVTVKQLKEDYFKKIECFDSVEISGVEDRFNASLGTYHDLLKIIKDKDFLDNEENEDILEDIVLTLTLFEDREMIEERLKTYAHLFDDKVMKQLKRRRYTGWGRLSRKLINGIRDKQSGKTILDFLKSDGFANRNFMQLIHDDSLTFKEDIQKAQVSGQGDSLHEHIANLAGSPAIKKGILQTVKVVDELVKVMGRHKPENIVIEMARENQTTQKGQKNSRERMKRIEEGIKELGSQILKEHPVENTQLQNEKLYLYYLQNGRDMYVDQELDINRLSDYDVDHIVPQSFLKDDSIDNKVLTRSDKARGKSDNVPSEEVVKKMKNYWRQLLNAKLITQRKFDNLTKAERGGLSELDKAGFIKRQLVETRQITKHVAQILDSRMNTKYDENDKLIREVKVITLKSKLVSDFRKDFQFYKVREINNYHHAHDAYLNAVVGTALIKKYPKLESEFVYGDYKVYDVRKMIAKSEQEIGKATAKYFFYSNIMNFFKTEITLANGEIRKRPLIETNGETGEIVWDKGRDFATVRKVLSMPQVNIVKKTEVQTGGFSKESILPKRNSDKLIARKKDWDPKKYGGFDSPTVAYSVLVVAKVEKGKSKKLKSVKELLGITIMERSSFEKNPIDFLEAKGYKEVKKDLIIKLPKYSLFELENGRKRMLASAGELQKGNELALPSKYVNFLYLASHYEKLKGSPEDNEQKQLFVEQHKHYLDEIIEQISEFSKRVILADANLDKVLSAYNKHRDKPIREQAENIIHLFTLTNLGAPAAFKYFDTTIDRKRYTSTKEVLDATLIHQSITGLYETRIDLSQLGGDGGGSSGGGVLDTPPSHIGLEHLPPPPEVPQFPLNLERLQALQDLVHRSLEAGYISPWDGPGNNPVFPVRKPNGAWRFVHDLRATNALTKPIPALSPGPPDLTAIPTHPPHIICLDLKDAFFQIPVEDRFRFYLSFTLPSPGGLQPHRRFAWRVLPQGFINSPALFERALQEPLRQVSAAFSQSLLVSYMDDILYASPTEEQRSQCYQALAARLRDLGFQVASEKTSQTPSPVPFLGQMVHEQIVTYQSLPTLQISSPISLHQLQAVLGDLQWVSRGTPTTRRPLQLLYSSLKRHHDPRAIIQLSPEQLQGIAELRQALSHNARSRYNEQEPLLAYVHLTRAGSTLVLFQKGAQFPLAYFQTPLTDNQASPWGLLLLLGCQYLQTQALSSYAKPILKYYHNLPKTSLDNWIQSSEDPRVQELLQLWPQISSQGIQPPGPWKTLITRAEVFLTPQFSPDPIPAALCLFSDGATGRGAYCLWKDHLLDFQAVPAPESAQKGELAGLLAGLAAAPPEPVNIWVDSKYLYSLLRTLVLGAWLQPDPVPSYALLYKSLLRHPAIVVGHVRSHSSASHPIASLNNYVDQLAGKRTADGSEFEKRTADGSEFESPKKKAKVEGSGEGRGSLLTCGDVEENPG

SEQ ID NO: 3729 - protein, 2016 aa, synthetic construct
MPAAKRVKLDGGDKKYSIGLDIGTNSVGWAVITDEYKVPSKKFKVLGNTDRHSIKKNLIGALLFDSGETAEATRLKRTARRRYTRRKNRICYLQEIFSNEMAKVDDSFFHRLEESFLVEEDKKHERHPIFGNIVDEVAYHEKYPTIYHLRKKLVDSTDKADLRLIYLALAHMIKFRGHFLIEGDLNPDNSDVDKLFIQLVQTYNQLFEENPINASGVDAKAILSARLSKSRRLENLIAQLPGEKKNGLFGNLIALSLGLTPNFKSNFDLAEDAKLQLSKDTYDDDLDNLLAQIGDQYADLFLAAKNLSDAILLSDILRVNTEITKAPLSASMIKRYDEHHQDLTLLKALVRQQLPEKYKEIFFDQSKNGYAGYIDGGASQEEFYKFIKPILEKMDGTEELLVKLNREDLLRKQRTFDNGSIPHQIHLGELHAILRRQEDFYPFLKDNREKIEKILTFRIPYYVGPLARGNSRFAWMTRKSEETITPWNFEEVVDKGASAQSFIERMTNFDKNLPNEKVLPKHSLLYEYFTVYNELTKVKYVTEGMRKPAFLSGEQKKAIVDLLFKTNRKVTVKQLKEDYFKKIECFDSVEISGVEDRFNASLGTYHDLLKIIKDKDFLDNEENEDILEDIVLTLTLFEDREMIEERLKTYAHLFDDKVMKQLKRRRYTGWGRLSRKLINGIRDKQSGKTILDFLKSDGFANRNFMQLIHDDSLTFKEDIQKAQVSGQGDSLHEHIANLAGSPAIKKGILQTVKVVDELVKVMGRHKPENIVIEMARENQTTQKGQKNSRERMKRIEEGIKELGSQILKEHPVENTQLQNEKLYLYYLQNGRDMYVDQELDINRLSDYDVDHIVPQSFLKDDSIDNKVLTRSDKARGKSDNVPSEEVVKKMKNYWRQLLNAKLITQRKFDNLTKAERGGLSELDKAGFIKRQLVETRQITKHVAQILDSRMNTKYDENDKLIREVKVITLKSKLVSDFRKDFQFYKVREINNYHHAHDAYLNAVVGTALIKKYPKLESEFVYGDYKVYDVRKMIAKSEQEIGKATAKYFFYSNIMNFFKTEITLANGEIRKRPLIETNGETGEIVWDKGRDFATVRKVLSMPQVNIVKKTEVQTGGFSKESILPKRNSDKLIARKKDWDPKKYGGFDSPTVAYSVLVVAKVEKGKSKKLKSVKELLGITIMERSSFEKNPIDFLEAKGYKEVKKDLIIKLPKYSLFELENGRKRMLASAGELQKGNELALPSKYVNFLYLASHYEKLKGSPEDNEQKQLFVEQHKHYLDEIIEQISEFSKRVILADANLDKVLSAYNKHRDKPIREQAENIIHLFTLTNLGAPAAFKYFDTTIDRKRYTSTKEVLDATLIHQSITGLYETRIDLSQLGGDGGGSSGGSGGGVLDTPPSHIGLEHLPPPPEVPQFPLNLERLQALQDLVHRSLEAGYISPWDGPGNNPVFPVRKPNGAWRFVHDLRATNALTKPIPALSPGPPDLTAIPTHPPHIICLDLKDAFFQIPVEDRFRFYLSFTLPSPGGLQPHRRFAWRVLPQGFINSPALFERALQEPLRQVSAAFSQSLLVSYMDDILYASPTEEQRSQCYQALAARLRDLGFQVASEKTSQTPSPVPFLGQMVHEQIVTYQSLPTLQISSPISLHQLQAVLGDLQWVSRGTPTTRRPLQLLYSSLKRHHDPRAIIQLSPEQLQGIAELRQALSHNARSRYNEQEPLLAYVHLTRAGSTLVLFQKGAQFPLAYFQTPLTDNQASPWGLLLLLGCQYLQTQALSSYAKPILKYYHNLPKTSLDNWIQSSEDPRVQELLQLWPQISSQGIQPPGPWKTLITRAEVFLTPQFSPDPIPAALCLFSDGATGRGAYCLWKDHLLDFQAVPAPESAQKGELAGLLAGLAAAPPEPVNIWVDSKYLYSLLRTLVLGAWLQPDPVPSYALLYKSLLRHPAIVVGHVRSHSSASHPIASLNNYVDQLAGKRTADGSEFEKRTADGSEFESPKKKAKVEGSGEGRGSLLTCGDVEENPG

SEQ ID NO: 3730 - protein, 2019 aa, synthetic construct
MPAAKRVKLDGGDKKYSIGLDIGTNSVGWAVITDEYKVPSKKFKVLGNTDRHSIKKNLIGALLFDSGETAEATRLKRTARRRYTRRKNRICYLQEIFSNEMAKVDDSFFHRLEESFLVEEDKKHERHPIFGNIVDEVAYHEKYPTIYHLRKKLVDSTDKADLRLIYLALAHMIKFRGHFLIEGDLNPDNSDVDKLFIQLVQTYNQLFEENPINASGVDAKAILSARLSKSRRLENLIAQLPGEKKNGLFGNLIALSLGLTPNFKSNFDLAEDAKLQLSKDTYDDDLDNLLAQIGDQYADLFLAAKNLSDAILLSDILRVNTEITKAPLSASMIKRYDEHHQDLTLLKALVRQQLPEKYKEIFFDQSKNGYAGYIDGGASQEEFYKFIKPILEKMDGTEELLVKLNREDLLRKQRTFDNGSIPHQIHLGELHAILRRQEDFYPFLKDNREKIEKILTFRIPYYVGPLARGNSRFAWMTRKSEETITPWNFEEVVDKGASAQSFIERMTNFDKNLPNEKVLPKHSLLYEYFTVYNELTKVKYVTEGMRKPAFLSGEQKKAIVDLLFKTNRKVTVKQLKEDYFKKIECFDSVEISGVEDRFNASLGTYHDLLKIIKDKDFLDNEENEDILEDIVLTLTLFEDREMIEERLKTYAHLFDDKVMKQLKRRRYTGWGRLSRKLINGIRDKQSGKTILDFLKSDGFANRNFMQLIHDDSLTFKEDIQKAQVSGQGDSLHEHIANLAGSPAIKKGILQTVKVVDELVKVMGRHKPENIVIEMARENQTTQKGQKNSRERMKRIEEGIKELGSQILKEHPVENTQLQNEKLYLYYLQNGRDMYVDQELDINRLSDYDVDHIVPQSFLKDDSIDNKVLTRSDKARGKSDNVPSEEVVKKMKNYWRQLLNAKLITQRKFDNLTKAERGGLSELDKAGFIKRQLVETRQITKHVAQILDSRMNTKYDENDKLIREVKVITLKSKLVSDFRKDFQFYKVREINNYHHAHDAYLNAVVGTALIKKYPKLESEFVYGDYKVYDVRKMIAKSEQEIGKATAKYFFYSNIMNFFKTEITLANGEIRKRPLIETNGETGEIVWDKGRDFATVRKVLSMPQVNIVKKTEVQTGGFSKESILPKRNSDKLIARKKDWDPKKYGGFDSPTVAYSVLVVAKVEKGKSKKLKSVKELLGITIMERSSFEKNPIDFLEAKGYKEVKKDLIIKLPKYSLFELENGRKRMLASAGELQKGNELALPSKYVNFLYLASHYEKLKGSPEDNEQKQLFVEQHKHYLDEIIEQISEFSKRVILADANLDKVLSAYNKHRDKPIREQAENIIHLFTLTNLGAPAAFKYFDTTIDRKRYTSTKEVLDATLIHQSITGLYETRIDLSQLGGDGGGGSGGGGSSGGGVLDTPPSHIGLEHLPPPPEVPQFPLNLERLQALQDLVHRSLEAGYISPWDGPGNNPVFPVRKPNGAWRFVHDLRATNALTKPIPALSPGPPDLTAIPTHPPHIICLDLKDAFFQIPVEDRFRFYLSFTLPSPGGLQPHRRFAWRVLPQGFINSPALFERALQEPLRQVSAAFSQSLLVSYMDDILYASPTEEQRSQCYQALAARLRDLGFQVASEKTSQTPSPVPFLGQMVHEQIVTYQSLPTLQISSPISLHQLQAVLGDLQWVSRGTPTTRRPLQLLYSSLKRHHDPRAIIQLSPEQLQGIAELRQALSHNARSRYNEQEPLLAYVHLTRAGSTLVLFQKGAQFPLAYFQTPLTDNQASPWGLLLLLGCQYLQTQALSSYAKPILKYYHNLPKTSLDNWIQSSEDPRVQELLQLWPQISSQGIQPPGPWKTLITRAEVFLTPQFSPDPIPAALCLFSDGATGRGAYCLWKDHLLDFQAVPAPESAQKGELAGLLAGLAAAPPEPVNIWVDSKYLYSLLRTLVLGAWLQPDPVPSYALLYKSLLRHPAIVVGHVRSHSSASHPIASLNNYVDQLAGKRTADGSEFEKRTADGSEFESPKKKAKVEGSGEGRGSLLTCGDVEENPG

SEQ ID NO: 3731 - protein, 2021 aa, synthetic construct
MPAAKRVKLDGGDKKYSIGLDIGTNSVGWAVITDEYKVPSKKFKVLGNTDRHSIKKNLIGALLFDSGETAEATRLKRTARRRYTRRKNRICYLQEIFSNEMAKVDDSFFHRLEESFLVEEDKKHERHPIFGNIVDEVAYHEKYPTIYHLRKKLVDSTDKADLRLIYLALAHMIKFRGHFLIEGDLNPDNSDVDKLFIQLVQTYNQLFEENPINASGVDAKAILSARLSKSRRLENLIAQLPGEKKNGLFGNLIALSLGLTPNFKSNFDLAEDAKLQLSKDTYDDDLDNLLAQIGDQYADLFLAAKNLSDAILLSDILRVNTEITKAPLSASMIKRYDEHHQDLTLLKALVRQQLPEKYKEIFFDQSKNGYAGYIDGGASQEEFYKFIKPILEKMDGTEELLVKLNREDLLRKQRTFDNGSIPHQIHLGELHAILRRQEDFYPFLKDNREKIEKILTFRIPYYVGPLARGNSRFAWMTRKSEETITPWNFEEVVDKGASAQSFIERMTNFDKNLPNEKVLPKHSLLYEYFTVYNELTKVKYVTEGMRKPAFLSGEQKKAIVDLLFKTNRKVTVKQLKEDYFKKIECFDSVEISGVEDRFNASLGTYHDLLKIIKDKDFLDNEENEDILEDIVLTLTLFEDREMIEERLKTYAHLFDDKVMKQLKRRRYTGWGRLSRKLINGIRDKQSGKTILDFLKSDGFANRNFMQLIHDDSLTFKEDIQKAQVSGQGDSLHEHIANLAGSPAIKKGILQTVKVVDELVKVMGRHKPENIVIEMARENQTTQKGQKNSRERMKRIEEGIKELGSQILKEHPVENTQLQNEKLYLYYLQNGRDMYVDQELDINRLSDYDVDHIVPQSFLKDDSIDNKVLTRSDKARGKSDNVPSEEVVKKMKNYWRQLLNAKLITQRKFDNLTKAERGGLSELDKAGFIKRQLVETRQITKHVAQILDSRMNTKYDENDKLIREVKVITLKSKLVSDFRKDFQFYKVREINNYHHAHDAYLNAVVGTALIKKYPKLESEFVYGDYKVYDVRKMIAKSEQEIGKATAKYFFYSNIMNFFKTEITLANGEIRKRPLIETNGETGEIVWDKGRDFATVRKVLSMPQVNIVKKTEVQTGGFSKESILPKRNSDKLIARKKDWDPKKYGGFDSPTVAYSVLVVAKVEKGKSKKLKSVKELLGITIMERSSFEKNPIDFLEAKGYKEVKKDLIIKLPKYSLFELENGRKRMLASAGELQKGNELALPSKYVNFLYLASHYEKLKGSPEDNEQKQLFVEQHKHYLDEIIEQISEFSKRVILADANLDKVLSAYNKHRDKPIREQAENIIHLFTLTNLGAPAAFKYFDTTIDRKRYTSTKEVLDATLIHQSITGLYETRIDLSQLGGDGGGSSGGSEAAAKGGGVLDTPPSHIGLEHLPPPPEVPQFPLNLERLQALQDLVHRSLEAGYISPWDGPGNNPVFPVRKPNGAWRFVHDLRATNALTKPIPALSPGPPDLTAIPTHPPHIICLDLKDAFFQIPVEDRFRFYLSFTLPSPGGLQPHRRFAWRVLPQGFINSPALFERALQEPLRQVSAAFSQSLLVSYMDDILYASPTEEQRSQCYQALAARLRDLGFQVASEKTSQTPSPVPFLGQMVHEQIVTYQSLPTLQISSPISLHQLQAVLGDLQWVSRGTPTTRRPLQLLYSSLKRHHDPRAIIQLSPEQLQGIAELRQALSHNARSRYNEQEPLLAYVHLTRAGSTLVLFQKGAQFPLAYFQTPLTDNQASPWGLLLLLGCQYLQTQALSSYAKPILKYYHNLPKTSLDNWIQSSEDPRVQELLQLWPQISSQGIQPPGPWKTLITRAEVFLTPQFSPDPIPAALCLFSDGATGRGAYCLWKDHLLDFQAVPAPESAQKGELAGLLAGLAAAPPEPVNIWVDSKYLYSLLRTLVLGAWLQPDPVPSYALLYKSLLRHPAIVVGHVRSHSSASHPIASLNNYVDQLAGKRTADGSEFEKRTADGSEFESPKKKAKVEGSGEGRGSLLTCGDVEENPG

SEQ ID NO: 3732 - protein, 2021 aa, synthetic construct
MPAAKRVKLDGGDKKYSIGLDIGTNSVGWAVITDEYKVPSKKFKVLGNTDRHSIKKNLIGALLFDSGETAEATRLKRTARRRYTRRKNRICYLQEIFSNEMAKVDDSFFHRLEESFLVEEDKKHERHPIFGNIVDEVAYHEKYPTIYHLRKKLVDSTDKADLRLIYLALAHMIKFRGHFLIEGDLNPDNSDVDKLFIQLVQTYNQLFEENPINASGVDAKAILSARLSKSRRLENLIAQLPGEKKNGLFGNLIALSLGLTPNFKSNFDLAEDAKLQLSKDTYDDDLDNLLAQIGDQYADLFLAAKNLSDAILLSDILRVNTEITKAPLSASMIKRYDEHHQDLTLLKALVRQQLPEKYKEIFFDQSKNGYAGYIDGGASQEEFYKFIKPILEKMDGTEELLVKLNREDLLRKQRTFDNGSIPHQIHLGELHAILRRQEDFYPFLKDNREKIEKILTFRIPYYVGPLARGNSRFAWMTRKSEETITPWNFEEVVDKGASAQSFIERMTNFDKNLPNEKVLPKHSLLYEYFTVYNELTKVKYVTEGMRKPAFLSGEQKKAIVDLLFKTNRKVTVKQLKEDYFKKIECFDSVEISGVEDRFNASLGTYHDLLKIIKDKDFLDNEENEDILEDIVLTLTLFEDREMIEERLKTYAHLFDDKVMKQLKRRRYTGWGRLSRKLINGIRDKQSGKTILDFLKSDGFANRNFMQLIHDDSLTFKEDIQKAQVSGQGDSLHEHIANLAGSPAIKKGILQTVKVVDELVKVMGRHKPENIVIEMARENQTTQKGQKNSRERMKRIEEGIKELGSQILKEHPVENTQLQNEKLYLYYLQNGRDMYVDQELDINRLSDYDVDHIVPQSFLKDDSIDNKVLTRSDKARGKSDNVPSEEVVKKMKNYWRQLLNAKLITQRKFDNLTKAERGGLSELDKAGFIKRQLVETRQITKHVAQILDSRMNTKYDENDKLIREVKVITLKSKLVSDFRKDFQFYKVREINNYHHAHDAYLNAVVGTALIKKYPKLESEFVYGDYKVYDVRKMIAKSEQEIGKATAKYFFYSNIMNFFKTEITLANGEIRKRPLIETNGETGEIVWDKGRDFATVRKVLSMPQVNIVKKTEVQTGGFSKESILPKRNSDKLIARKKDWDPKKYGGFDSPTVAYSVLVVAKVEKGKSKKLKSVKELLGITIMERSSFEKNPIDFLEAKGYKEVKKDLIIKLPKYSLFELENGRKRMLASAGELQKGNELALPSKYVNFLYLASHYEKLKGSPEDNEQKQLFVEQHKHYLDEIIEQISEFSKRVILADANLDKVLSAYNKHRDKPIREQAENIIHLFTLTNLGAPAAFKYFDTTIDRKRYTSTKEVLDATLIHQSITGLYETRIDLSQLGGDGGGGSEAAAKPAPGGGVLDTPPSHIGLEHLPPPPEVPQFPLNLERLQALQDLVHRSLEAGYISPWDGPGNNPVFPVRKPNGAWRFVHDLRATNALTKPIPALSPGPPDLTAIPTHPPHIICLDLKDAFFQIPVEDRFRFYLSFTLPSPGGLQPHRRFAWRVLPQGFINSPALFERALQEPLRQVSAAFSQSLLVSYMDDILYASPTEEQRSQCYQALAARLRDLGFQVASEKTSQTPSPVPFLGQMVHEQIVTYQSLPTLQISSPISLHQLQAVLGDLQWVSRGTPTTRRPLQLLYSSLKRHHDPRAIIQLSPEQLQGIAELRQALSHNARSRYNEQEPLLAYVHLTRAGSTLVLFQKGAQFPLAYFQTPLTDNQASPWGLLLLLGCQYLQTQALSSYAKPILKYYHNLPKTSLDNWIQSSEDPRVQELLQLWPQISSQGIQPPGPWKTLITRAEVFLTPQFSPDPIPAALCLFSDGATGRGAYCLWKDHLLDFQAVPAPESAQKGELAGLLAGLAAAPPEPVNIWVDSKYLYSLLRTLVLGAWLQPDPVPSYALLYKSLLRHPAIVVGHVRSHSSASHPIASLNNYVDQLAGKRTADGSEFEKRTADGSEFESPKKKAKVEGSGEGRGSLLTCGDVEENPG

SEQ ID NO: 3733 - protein, 2056 aa, synthetic construct
MPAAKRVKLDGGDKKYSIGLDIGTNSVGWAVITDEYKVPSKKFKVLGNTDRHSIKKNLIGALLFDSGETAEATRLKRTARRRYTRRKNRICYLQEIFSNEMAKVDDSFFHRLEESFLVEEDKKHERHPIFGNIVDEVAYHEKYPTIYHLRKKLVDSTDKADLRLIYLALAHMIKFRGHFLIEGDLNPDNSDVDKLFIQLVQTYNQLFEENPINASGVDAKAILSARLSKSRRLENLIAQLPGEKKNGLFGNLIALSLGLTPNFKSNFDLAEDAKLQLSKDTYDDDLDNLLAQIGDQYADLFLAAKNLSDAILLSDILRVNTEITKAPLSASMIKRYDEHHQDLTLLKALVRQQLPEKYKEIFFDQSKNGYAGYIDGGASQEEFYKFIKPILEKMDGTEELLVKLNREDLLRKQRTFDNGSIPHQIHLGELHAILRRQEDFYPFLKDNREKIEKILTFRIPYYVGPLARGNSRFAWMTRKSEETITPWNFEEVVDKGASAQSFIERMTNFDKNLPNEKVLPKHSLLYEYFTVYNELTKVKYVTEGMRKPAFLSGEQKKAIVDLLFKTNRKVTVKQLKEDYFKKIECFDSVEISGVEDRFNASLGTYHDLLKIIKDKDFLDNEENEDILEDIVLTLTLFEDREMIEERLKTYAHLFDDKVMKQLKRRRYTGWGRLSRKLINGIRDKQSGKTILDFLKSDGFANRNFMQLIHDDSLTFKEDIQKAQVSGQGDSLHEHIANLAGSPAIKKGILQTVKVVDELVKVMGRHKPENIVIEMARENQTTQKGQKNSRERMKRIEEGIKELGSQILKEHPVENTQLQNEKLYLYYLQNGRDMYVDQELDINRLSDYDVDHIVPQSFLKDDSIDNKVLTRSDKARGKSDNVPSEEVVKKMKNYWRQLLNAKLITQRKFDNLTKAERGGLSELDKAGFIKRQLVETRQITKHVAQILDSRMNTKYDENDKLIREVKVITLKSKLVSDFRKDFQFYKVREINNYHHAHDAYLNAVVGTALIKKYPKLESEFVYGDYKVYDVRKMIAKSEQEIGKATAKYFFYSNIMNFFKTEITLANGEIRKRPLIETNGETGEIVWDKGRDFATVRKVLSMPQVNIVKKTEVQTGGFSKESILPKRNSDKLIARKKDWDPKKYGGFDSPTVAYSVLVVAKVEKGKSKKLKSVKELLGITIMERSSFEKNPIDFLEAKGYKEVKKDLIIKLPKYSLFELENGRKRMLASAGELQKGNELALPSKYVNFLYLASHYEKLKGSPEDNEQKQLFVEQHKHYLDEIIEQISEFSKRVILADANLDKVLSAYNKHRDKPIREQAENIIHLFTLTNLGAPAAFKYFDTTIDRKRYTSTKEVLDATLIHQSITGLYETRIDLSQLGGDGGAEAAAKEAAAKEAAAKEAAAKALEAEAAAKEAAAKEAAAKEAAAKAGGGVLDTPPSHIGLEHLPPPPEVPQFPLNLERLQALQDLVHRSLEAGYISPWDGPGNNPVFPVRKPNGAWRFVHDLRATNALTKPIPALSPGPPDLTAIPTHPPHIICLDLKDAFFQIPVEDRFRFYLSFTLPSPGGLQPHRRFAWRVLPQGFINSPALFERALQEPLRQVSAAFSQSLLVSYMDDILYASPTEEQRSQCYQALAARLRDLGFQVASEKTSQTPSPVPFLGQMVHEQIVTYQSLPTLQISSPISLHQLQAVLGDLQWVSRGTPTTRRPLQLLYSSLKRHHDPRAIIQLSPEQLQGIAELRQALSHNARSRYNEQEPLLAYVHLTRAGSTLVLFQKGAQFPLAYFQTPLTDNQASPWGLLLLLGCQYLQTQALSSYAKPILKYYHNLPKTSLDNWIQSSEDPRVQELLQLWPQISSQGIQPPGPWKTLITRAEVFLTPQFSPDPIPAALCLFSDGATGRGAYCLWKDHLLDFQAVPAPESAQKGELAGLLAGLAAAPPEPVNIWVDSKYLYSLLRTLVLGAWLQPDPVPSYALLYKSLLRHPAIVVGHVRSHSSASHPIASLNNYVDQLAGKRTADGSEFEKRTADGSEFESPKKKAKVEGSGEGRGSLLTCGDVEENPG

SEQ ID NO: 3734 - protein, 2043 aa, synthetic construct
MPAAKRVKLDGGDKKYSIGLDIGTNSVGWAVITDEYKVPSKKFKVLGNTDRHSIKKNLIGALLFDSGETAEATRLKRTARRRYTRRKNRICYLQEIFSNEMAKVDDSFFHRLEESFLVEEDKKHERHPIFGNIVDEVAYHEKYPTIYHLRKKLVDSTDKADLRLIYLALAHMIKFRGHFLIEGDLNPDNSDVDKLFIQLVQTYNQLFEENPINASGVDAKAILSARLSKSRRLENLIAQLPGEKKNGLFGNLIALSLGLTPNFKSNFDLAEDAKLQLSKDTYDDDLDNLLAQIGDQYADLFLAAKNLSDAILLSDILRVNTEITKAPLSASMIKRYDEHHQDLTLLKALVRQQLPEKYKEIFFDQSKNGYAGYIDGGASQEEFYKFIKPILEKMDGTEELLVKLNREDLLRKQRTFDNGSIPHQIHLGELHAILRRQEDFYPFLKDNREKIEKILTFRIPYYVGPLARGNSRFAWMTRKSEETITPWNFEEVVDKGASAQSFIERMTNFDKNLPNEKVLPKHSLLYEYFTVYNELTKVKYVTEGMRKPAFLSGEQKKAIVDLLFKTNRKVTVKQLKEDYFKKIECFDSVEISGVEDRFNASLGTYHDLLKIIKDKDFLDNEENEDILEDIVLTLTLFEDREMIEERLKTYAHLFDDKVMKQLKRRRYTGWGRLSRKLINGIRDKQSGKTILDFLKSDGFANRNFMQLIHDDSLTFKEDIQKAQVSGQGDSLHEHIANLAGSPAIKKGILQTVKVVDELVKVMGRHKPENIVIEMARENQTTQKGQKNSRERMKRIEEGIKELGSQILKEHPVENTQLQNEKLYLYYLQNGRDMYVDQELDINRLSDYDVDHIVPQSFLKDDSIDNKVLTRSDKARGKSDNVPSEEVVKKMKNYWRQLLNAKLITQRKFDNLTKAERGGLSELDKAGFIKRQLVETRQITKHVAQILDSRMNTKYDENDKLIREVKVITLKSKLVSDFRKDFQFYKVREINNYHHAHDAYLNAVVGTALIKKYPKLESEFVYGDYKVYDVRKMIAKSEQEIGKATAKYFFYSNIMNFFKTEITLANGEIRKRPLIETNGETGEIVWDKGRDFATVRKVLSMPQVNIVKKTEVQTGGFSKESILPKRNSDKLIARKKDWDPKKYGGFDSPTVAYSVLVVAKVEKGKSKKLKSVKELLGITIMERSSFEKNPIDFLEAKGYKEVKKDLIIKLPKYSLFELENGRKRMLASAGELQKGNELALPSKYVNFLYLASHYEKLKGSPEDNEQKQLFVEQHKHYLDEIIEQISEFSKRVILADANLDKVLSAYNKHRDKPIREQAENIIHLFTLTNLGAPAAFKYFDTTIDRKRYTSTKEVLDATLIHQSITGLYETRIDLSQLGGDGGSGGSSGGSSGSETPGTSESATPESSGGSSGGSSGGGVLDTPPSHIGLEHLPPPPEVPQFPLNLERLQALQDLVHRSLEAGYISPWDGPGNNPVFPVRKPNGAWRFVHDLRATNALTKPIPALSPGPPDLTAPPTHPPHIICLDLKDAFFQIPVEDRFRFYLSFTLPSPGGLQPHRRFAWRVLPQGFINSPALFQRALQEPLRQVSAAFSQSLLVSYMDDILYASPTEEQRSQCYQALAARLRDLGFQVASEKTSQTPSPVPFLGQMVHEQIVTYQSLPTLQISSPISLHQLQAVLGDLQWVSRGTPTTRRPLQLLYSSLKRHHDPRAIIQLSPEQLQGIAELRQALSHNARSRYNEQEPLLAYVHLTRAGSTLVLFQKGAQFPLAYFQTPLTDNQASPWGLLLLLGCQYLQTQALSSYAKPILKYYHNLPKTSLDNWIQSSEDPRVQELLQLWPQISSQGIQPPGPWKTLITRAEVFLTPQFSPDPIPAALCLFSDGATGRGAYCLWKDHLLDFQAVPAPESAQKGELAGLLAGLAAAPPEPVNIWVDSKYLYSLLRTWVLGAWLQPDPVPSYALLYKSLLRHPAIVVGHVRSHSSASHPIASLNNYVDQLAGKRTADGSEFEKRTADGSEFESPKKKAKVEGSGEGRGSLLTCGDVEENPG

SEQ ID NO: 3735 - protein, 2019 aa, synthetic construct
MPAAKRVKLDGGDKKYSIGLDIGTNSVGWAVITDEYKVPSKKFKVLGNTDRHSIKKNLIGALLFDSGETAEATRLKRTARRRYTRRKNRICYLQEIFSNEMAKVDDSFFHRLEESFLVEEDKKHERHPIFGNIVDEVAYHEKYPTIYHLRKKLVDSTDKADLRLIYLALAHMIKFRGHFLIEGDLNPDNSDVDKLFIQLVQTYNQLFEENPINASGVDAKAILSARLSKSRRLENLIAQLPGEKKNGLFGNLIALSLGLTPNFKSNFDLAEDAKLQLSKDTYDDDLDNLLAQIGDQYADLFLAAKNLSDAILLSDILRVNTEITKAPLSASMIKRYDEHHQDLTLLKALVRQQLPEKYKEIFFDQSKNGYAGYIDGGASQEEFYKFIKPILEKMDGTEELLVKLNREDLLRKQRTFDNGSIPHQIHLGELHAILRRQEDFYPFLKDNREKIEKILTFRIPYYVGPLARGNSRFAWMTRKSEETITPWNFEEVVDKGASAQSFIERMTNFDKNLPNEKVLPKHSLLYEYFTVYNELTKVKYVTEGMRKPAFLSGEQKKAIVDLLFKTNRKVTVKQLKEDYFKKIECFDSVEISGVEDRFNASLGTYHDLLKIIKDKDFLDNEENEDILEDIVLTLTLFEDREMIEERLKTYAHLFDDKVMKQLKRRRYTGWGRLSRKLINGIRDKQSGKTILDFLKSDGFANRNFMQLIHDDSLTFKEDIQKAQVSGQGDSLHEHIANLAGSPAIKKGILQTVKVVDELVKVMGRHKPENIVIEMARENQTTQKGQKNSRERMKRIEEGIKELGSQILKEHPVENTQLQNEKLYLYYLQNGRDMYVDQELDINRLSDYDVDHIVPQSFLKDDSIDNKVLTRSDKARGKSDNVPSEEVVKKMKNYWRQLLNAKLITQRKFDNLTKAERGGLSELDKAGFIKRQLVETRQITKHVAQILDSRMNTKYDENDKLIREVKVITLKSKLVSDFRKDFQFYKVREINNYHHAHDAYLNAVVGTALIKKYPKLESEFVYGDYKVYDVRKMIAKSEQEIGKATAKYFFYSNIMNFFKTEITLANGEIRKRPLIETNGETGEIVWDKGRDFATVRKVLSMPQVNIVKKTEVQTGGFSKESILPKRNSDKLIARKKDWDPKKYGGFDSPTVAYSVLVVAKVEKGKSKKLKSVKELLGITIMERSSFEKNPIDFLEAKGYKEVKKDLIIKLPKYSLFELENGRKRMLASAGELQKGNELALPSKYVNFLYLASHYEKLKGSPEDNEQKQLFVEQHKHYLDEIIEQISEFSKRVILADANLDKVLSAYNKHRDKPIREQAENIIHLFTLTNLGAPAAFKYFDTTIDRKRYTSTKEVLDATLIHQSITGLYETRIDLSQLGGDGGPAPGGGGSSGGGVLDTPPSHIGLEHLPPPPEVPQFPLNLERLQALQDLVHRSLEAGYISPWDGPGNNPVFPVRKPNGAWRFVHDLRATNALTKPIPALSPGPPDLTAPPTHPPHIICLDLKDAFFQIPVEDRFRFYLSFTLPSPGGLQPHRRFAWRVLPQGFINSPALFQRALQEPLRQVSAAFSQSLLVSYMDDILYASPTEEQRSQCYQALAARLRDLGFQVASEKTSQTPSPVPFLGQMVHEQIVTYQSLPTLQISSPISLHQLQAVLGDLQWVSRGTPTTRRPLQLLYSSLKRHHDPRAIIQLSPEQLQGIAELRQALSHNARSRYNEQEPLLAYVHLTRAGSTLVLFQKGAQFPLAYFQTPLTDNQASPWGLLLLLGCQYLQTQALSSYAKPILKYYHNLPKTSLDNWIQSSEDPRVQELLQLWPQISSQGIQPPGPWKTLITRAEVFLTPQFSPDPIPAALCLFSDGATGRGAYCLWKDHLLDFQAVPAPESAQKGELAGLLAGLAAAPPEPVNIWVDSKYLYSLLRTWVLGAWLQPDPVPSYALLYKSLLRHPAIVVGHVRSHSSASHPIASLNNYVDQLAGKRTADGSEFEKRTADGSEFESPKKKAKVEGSGEGRGSLLTCGDVEENPG

SEQ ID NO: 3736 - protein, 2022 aa, synthetic construct
MPAAKRVKLDGGDKKYSIGLDIGTNSVGWAVITDEYKVPSKKFKVLGNTDRHSIKKNLIGALLFDSGETAEATRLKRTARRRYTRRKNRICYLQEIFSNEMAKVDDSFFHRLEESFLVEEDKKHERHPIFGNIVDEVAYHEKYPTIYHLRKKLVDSTDKADLRLIYLALAHMIKFRGHFLIEGDLNPDNSDVDKLFIQLVQTYNQLFEENPINASGVDAKAILSARLSKSRRLENLIAQLPGEKKNGLFGNLIALSLGLTPNFKSNFDLAEDAKLQLSKDTYDDDLDNLLAQIGDQYADLFLAAKNLSDAILLSDILRVNTEITKAPLSASMIKRYDEHHQDLTLLKALVRQQLPEKYKEIFFDQSKNGYAGYIDGGASQEEFYKFIKPILEKMDGTEELLVKLNREDLLRKQRTFDNGSIPHQIHLGELHAILRRQEDFYPFLKDNREKIEKILTFRIPYYVGPLARGNSRFAWMTRKSEETITPWNFEEVVDKGASAQSFIERMTNFDKNLPNEKVLPKHSLLYEYFTVYNELTKVKYVTEGMRKPAFLSGEQKKAIVDLLFKTNRKVTVKQLKEDYFKKIECFDSVEISGVEDRFNASLGTYHDLLKIIKDKDFLDNEENEDILEDIVLTLTLFEDREMIEERLKTYAHLFDDKVMKQLKRRRYTGWGRLSRKLINGIRDKQSGKTILDFLKSDGFANRNFMQLIHDDSLTFKEDIQKAQVSGQGDSLHEHIANLAGSPAIKKGILQTVKVVDELVKVMGRHKPENIVIEMARENQTTQKGQKNSRERMKRIEEGIKELGSQILKEHPVENTQLQNEKLYLYYLQNGRDMYVDQELDINRLSDYDVDHIVPQSFLKDDSIDNKVLTRSDKARGKSDNVPSEEVVKKMKNYWRQLLNAKLITQRKFDNLTKAERGGLSELDKAGFIKRQLVETRQITKHVAQILDSRMNTKYDENDKLIREVKVITLKSKLVSDFRKDFQFYKVREINNYHHAHDAYLNAVVGTALIKKYPKLESEFVYGDYKVYDVRKMIAKSEQEIGKATAKYFFYSNIMNFFKTEITLANGEIRKRPLIETNGETGEIVWDKGRDFATVRKVLSMPQVNIVKKTEVQTGGFSKESILPKRNSDKLIARKKDWDPKKYGGFDSPTVAYSVLVVAKVEKGKSKKLKSVKELLGITIMERSSFEKNPIDFLEAKGYKEVKKDLIIKLPKYSLFELENGRKRMLASAGELQKGNELALPSKYVNFLYLASHYEKLKGSPEDNEQKQLFVEQHKHYLDEIIEQISEFSKRVILADANLDKVLSAYNKHRDKPIREQAENIIHLFTLTNLGAPAAFKYFDTTIDRKRYTSTKEVLDATLIHQSITGLYETRIDLSQLGGDGGGSAGSAAGSGEFGGGVLDTPPSHIGLEHLPPPPEVPQFPLNLERLQALQDLVHRSLEAGYISPWDGPGNNPVFPVRKPNGAWRFVHDLRATNALTKPIPALSPGPPDLTAPPTHPPHIICLDLKDAFFQIPVEDRFRFYLSFTLPSPGGLQPHRRFAWRVLPQGFINSPALFQRALQEPLRQVSAAFSQSLLVSYMDDILYASPTEEQRSQCYQALAARLRDLGFQVASEKTSQTPSPVPFLGQMVHEQIVTYQSLPTLQISSPISLHQLQAVLGDLQWVSRGTPTTRRPLQLLYSSLKRHHDPRAIIQLSPEQLQGIAELRQALSHNARSRYNEQEPLLAYVHLTRAGSTLVLFQKGAQFPLAYFQTPLTDNQASPWGLLLLLGCQYLQTQALSSYAKPILKYYHNLPKTSLDNWIQSSEDPRVQELLQLWPQISSQGIQPPGPWKTLITRAEVFLTPQFSPDPIPAALCLFSDGATGRGAYCLWKDHLLDFQAVPAPESAQKGELAGLLAGLAAAPPEPVNIWVDSKYLYSLLRTWVLGAWLQPDPVPSYALLYKSLLRHPAIVVGHVRSHSSASHPIASLNNYVDQLAGKRTADGSEFEKRTADGSEFESPKKKAKVEGSGEGRGSLLTCGDVEENPG

SEQ ID NO: 3737 - protein, 2013 aa, synthetic construct
MPAAKRVKLDGGDKKYSIGLDIGTNSVGWAVITDEYKVPSKKFKVLGNTDRHSIKKNLIGALLFDSGETAEATRLKRTARRRYTRRKNRICYLQEIFSNEMAKVDDSFFHRLEESFLVEEDKKHERHPIFGNIVDEVAYHEKYPTIYHLRKKLVDSTDKADLRLIYLALAHMIKFRGHFLIEGDLNPDNSDVDKLFIQLVQTYNQLFEENPINASGVDAKAILSARLSKSRRLENLIAQLPGEKKNGLFGNLIALSLGLTPNFKSNFDLAEDAKLQLSKDTYDDDLDNLLAQIGDQYADLFLAAKNLSDAILLSDILRVNTEITKAPLSASMIKRYDEHHQDLTLLKALVRQQLPEKYKEIFFDQSKNGYAGYIDGGASQEEFYKFIKPILEKMDGTEELLVKLNREDLLRKQRTFDNGSIPHQIHLGELHAILRRQEDFYPFLKDNREKIEKILTFRIPYYVGPLARGNSRFAWMTRKSEETITPWNFEEVVDKGASAQSFIERMTNFDKNLPNEKVLPKHSLLYEYFTVYNELTKVKYVTEGMRKPAFLSGEQKKAIVDLLFKTNRKVTVKQLKEDYFKKIECFDSVEISGVEDRFNASLGTYHDLLKIIKDKDFLDNEENEDILEDIVLTLTLFEDREMIEERLKTYAHLFDDKVMKQLKRRRYTGWGRLSRKLINGIRDKQSGKTILDFLKSDGFANRNFMQLIHDDSLTFKEDIQKAQVSGQGDSLHEHIANLAGSPAIKKGILQTVKVVDELVKVMGRHKPENIVIEMARENQTTQKGQKNSRERMKRIEEGIKELGSQILKEHPVENTQLQNEKLYLYYLQNGRDMYVDQELDINRLSDYDVDHIVPQSFLKDDSIDNKVLTRSDKARGKSDNVPSEEVVKKMKNYWRQLLNAKLITQRKFDNLTKAERGGLSELDKAGFIKRQLVETRQITKHVAQILDSRMNTKYDENDKLIREVKVITLKSKLVSDFRKDFQFYKVREINNYHHAHDAYLNAVVGTALIKKYPKLESEFVYGDYKVYDVRKMIAKSEQEIGKATAKYFFYSNIMNFFKTEITLANGEIRKRPLIETNGETGEIVWDKGRDFATVRKVLSMPQVNIVKKTEVQTGGFSKESILPKRNSDKLIARKKDWDPKKYGGFDSPTVAYSVLVVAKVEKGKSKKLKSVKELLGITIMERSSFEKNPIDFLEAKGYKEVKKDLIIKLPKYSLFELENGRKRMLASAGELQKGNELALPSKYVNFLYLASHYEKLKGSPEDNEQKQLFVEQHKHYLDEIIEQISEFSKRVILADANLDKVLSAYNKHRDKPIREQAENIIHLFTLTNLGAPAAFKYFDTTIDRKRYTSTKEVLDATLIHQSITGLYETRIDLSQLGGDGGGGGGGGVLDTPPSHIGLEHLPPPPEVPQFPLNLERLQALQDLVHRSLEAGYISPWDGPGNNPVFPVRKPNGAWRFVHDLRATNALTKPIPALSPGPPDLTAPPTHPPHIICLDLKDAFFQIPVEDRFRFYLSFTLPSPGGLQPHRRFAWRVLPQGFINSPALFQRALQEPLRQVSAAFSQSLLVSYMDDILYASPTEEQRSQCYQALAARLRDLGFQVASEKTSQTPSPVPFLGQMVHEQIVTYQSLPTLQISSPISLHQLQAVLGDLQWVSRGTPTTRRPLQLLYSSLKRHHDPRAIIQLSPEQLQGIAELRQALSHNARSRYNEQEPLLAYVHLTRAGSTLVLFQKGAQFPLAYFQTPLTDNQASPWGLLLLLGCQYLQTQALSSYAKPILKYYHNLPKTSLDNWIQSSEDPRVQELLQLWPQISSQGIQPPGPWKTLITRAEVFLTPQFSPDPIPAALCLFSDGATGRGAYCLWKDHLLDFQAVPAPESAQKGELAGLLAGLAAAPPEPVNIWVDSKYLYSLLRTWVLGAWLQPDPVPSYALLYKSLLRHPAIVVGHVRSHSSASHPIASLNNYVDQLAGKRTADGSEFEKRTADGSEFESPKKKAKVEGSGEGRGSLLTCGDVEENPG

SEQ ID NO: 3738 - protein, 2016 aa, synthetic construct
MPAAKRVKLDGGDKKYSIGLDIGTNSVGWAVITDEYKVPSKKFKVLGNTDRHSIKKNLIGALLFDSGETAEATRLKRTARRRYTRRKNRICYLQEIFSNEMAKVDDSFFHRLEESFLVEEDKKHERHPIFGNIVDEVAYHEKYPTIYHLRKKLVDSTDKADLRLIYLALAHMIKFRGHFLIEGDLNPDNSDVDKLFIQLVQTYNQLFEENPINASGVDAKAILSARLSKSRRLENLIAQLPGEKKNGLFGNLIALSLGLTPNFKSNFDLAEDAKLQLSKDTYDDDLDNLLAQIGDQYADLFLAAKNLSDAILLSDILRVNTEITKAPLSASMIKRYDEHHQDLTLLKALVRQQLPEKYKEIFFDQSKNGYAGYIDGGASQEEFYKFIKPILEKMDGTEELLVKLNREDLLRKQRTFDNGSIPHQIHLGELHAILRRQEDFYPFLKDNREKIEKILTFRIPYYVGPLARGNSRFAWMTRKSEETITPWNFEEVVDKGASAQSFIERMTNFDKNLPNEKVLPKHSLLYEYFTVYNELTKVKYVTEGMRKPAFLSGEQKKAIVDLLFKTNRKVTVKQLKEDYFKKIECFDSVEISGVEDRFNASLGTYHDLLKIIKDKDFLDNEENEDILEDIVLTLTLFEDREMIEERLKTYAHLFDDKVMKQLKRRRYTGWGRLSRKLINGIRDKQSGKTILDFLKSDGFANRNFMQLIHDDSLTFKEDIQKAQVSGQGDSLHEHIANLAGSPAIKKGILQTVKVVDELVKVMGRHKPENIVIEMARENQTTQKGQKNSRERMKRIEEGIKELGSQILKEHPVENTQLQNEKLYLYYLQNGRDMYVDQELDINRLSDYDVDHIVPQSFLKDDSIDNKVLTRSDKARGKSDNVPSEEVVKKMKNYWRQLLNAKLITQRKFDNLTKAERGGLSELDKAGFIKRQLVETRQITKHVAQILDSRMNTKYDENDKLIREVKVITLKSKLVSDFRKDFQFYKVREINNYHHAHDAYLNAVVGTALIKKYPKLESEFVYGDYKVYDVRKMIAKSEQEIGKATAKYFFYSNIMNFFKTEITLANGEIRKRPLIETNGETGEIVWDKGRDFATVRKVLSMPQVNIVKKTEVQTGGFSKESILPKRNSDKLIARKKDWDPKKYGGFDSPTVAYSVLVVAKVEKGKSKKLKSVKELLGITIMERSSFEKNPIDFLEAKGYKEVKKDLIIKLPKYSLFELENGRKRMLASAGELQKGNELALPSKYVNFLYLASHYEKLKGSPEDNEQKQLFVEQHKHYLDEIIEQISEFSKRVILADANLDKVLSAYNKHRDKPIREQAENIIHLFTLTNLGAPAAFKYFDTTIDRKRYTSTKEVLDATLIHQSITGLYETRIDLSQLGGDGGGGGGGGGGGVLDTPPSHIGLEHLPPPPEVPQFPLNLERLQALQDLVHRSLEAGYISPWDGPGNNPVFPVRKPNGAWRFVHDLRATNALTKPIPALSPGPPDLTAPPTHPPHIICLDLKDAFFQIPVEDRFRFYLSFTLPSPGGLQPHRRFAWRVLPQGFINSPALFQRALQEPLRQVSAAFSQSLLVSYMDDILYASPTEEQRSQCYQALAARLRDLGFQVASEKTSQTPSPVPFLGQMVHEQIVTYQSLPTLQISSPISLHQLQAVLGDLQWVSRGTPTTRRPLQLLYSSLKRHHDPRAIIQLSPEQLQGIAELRQALSHNARSRYNEQEPLLAYVHLTRAGSTLVLFQKGAQFPLAYFQTPLTDNQASPWGLLLLLGCQYLQTQALSSYAKPILKYYHNLPKTSLDNWIQSSEDPRVQELLQLWPQISSQGIQPPGPWKTLITRAEVFLTPQFSPDPIPAALCLFSDGATGRGAYCLWKDHLLDFQAVPAPESAQKGELAGLLAGLAAAPPEPVNIWVDSKYLYSLLRTWVLGAWLQPDPVPSYALLYKSLLRHPAIVVGHVRSHSSASHPIASLNNYVDQLAGKRTADGSEFEKRTADGSEFESPKKKAKVEGSGEGRGSLLTCGDVEENPG

SEQ ID NO: 3739 - protein, 2022 aa, synthetic construct
MPAAKRVKLDGGDKKYSIGLDIGTNSVGWAVITDEYKVPSKKFKVLGNTDRHSIKKNLIGALLFDSGETAEATRLKRTARRRYTRRKNRICYLQEIFSNEMAKVDDSFFHRLEESFLVEEDKKHERHPIFGNIVDEVAYHEKYPTIYHLRKKLVDSTDKADLRLIYLALAHMIKFRGHFLIEGDLNPDNSDVDKLFIQLVQTYNQLFEENPINASGVDAKAILSARLSKSRRLENLIAQLPGEKKNGLFGNLIALSLGLTPNFKSNFDLAEDAKLQLSKDTYDDDLDNLLAQIGDQYADLFLAAKNLSDAILLSDILRVNTEITKAPLSASMIKRYDEHHQDLTLLKALVRQQLPEKYKEIFFDQSKNGYAGYIDGGASQEEFYKFIKPILEKMDGTEELLVKLNREDLLRKQRTFDNGSIPHQIHLGELHAILRRQEDFYPFLKDNREKIEKILTFRIPYYVGPLARGNSRFAWMTRKSEETITPWNFEEVVDKGASAQSFIERMTNFDKNLPNEKVLPKHSLLYEYFTVYNELTKVKYVTEGMRKPAFLSGEQKKAIVDLLFKTNRKVTVKQLKEDYFKKIECFDSVEISGVEDRFNASLGTYHDLLKIIKDKDFLDNEENEDILEDIVLTLTLFEDREMIEERLKTYAHLFDDKVMKQLKRRRYTGWGRLSRKLINGIRDKQSGKTILDFLKSDGFANRNFMQLIHDDSLTFKEDIQKAQVSGQGDSLHEHIANLAGSPAIKKGILQTVKVVDELVKVMGRHKPENIVIEMARENQTTQKGQKNSRERMKRIEEGIKELGSQILKEHPVENTQLQNEKLYLYYLQNGRDMYVDQELDINRLSDYDVDHIVPQSFLKDDSIDNKVLTRSDKARGKSDNVPSEEVVKKMKNYWRQLLNAKLITQRKFDNLTKAERGGLSELDKAGFIKRQLVETRQITKHVAQILDSRMNTKYDENDKLIREVKVITLKSKLVSDFRKDFQFYKVREINNYHHAHDAYLNAVVGTALIKKYPKLESEFVYGDYKVYDVRKMIAKSEQEIGKATAKYFFYSNIMNFFKTEITLANGEIRKRPLIETNGETGEIVWDKGRDFATVRKVLSMPQVNIVKKTEVQTGGFSKESILPKRNSDKLIARKKDWDPKKYGGFDSPTVAYSVLVVAKVEKGKSKKLKSVKELLGITIMERSSFEKNPIDFLEAKGYKEVKKDLIIKLPKYSLFELENGRKRMLASAGELQKGNELALPSKYVNFLYLASHYEKLKGSPEDNEQKQLFVEQHKHYLDEIIEQISEFSKRVILADANLDKVLSAYNKHRDKPIREQAENIIHLFTLTNLGAPAAFKYFDTTIDRKRYTSTKEVLDATLIHQSITGLYETRIDLSQLGGDGGGGSGGSGGSGGSGGGVLDTPPSHIGLEHLPPPPEVPQFPLNLERLQALQDLVHRSLEAGYISPWDGPGNNPVFPVRKPNGAWRFVHDLRATNALTKPIPALSPGPPDLTAPPTHPPHIICLDLKDAFFQIPVEDRFRFYLSFTLPSPGGLQPHRRFAWRVLPQGFINSPALFQRALQEPLRQVSAAFSQSLLVSYMDDILYASPTEEQRSQCYQALAARLRDLGFQVASEKTSQTPSPVPFLGQMVHEQIVTYQSLPTLQISSPISLHQLQAVLGDLQWVSRGTPTTRRPLQLLYSSLKRHHDPRAIIQLSPEQLQGIAELRQALSHNARSRYNEQEPLLAYVHLTRAGSTLVLFQKGAQFPLAYFQTPLTDNQASPWGLLLLLGCQYLQTQALSSYAKPILKYYHNLPKTSLDNWIQSSEDPRVQELLQLWPQISSQGIQPPGPWKTLITRAEVFLTPQFSPDPIPAALCLFSDGATGRGAYCLWKDHLLDFQAVPAPESAQKGELAGLLAGLAAAPPEPVNIWVDSKYLYSLLRTWVLGAWLQPDPVPSYALLYKSLLRHPAIVVGHVRSHSSASHPIASLNNYVDQLAGKRTADGSEFEKRTADGSEFESPKKKAKVEGSGEGRGSLLTCGDVEENPG

SEQ ID NO: 3740 - protein, 2019 aa, synthetic construct
MPAAKRVKLDGGDKKYSIGLDIGTNSVGWAVITDEYKVPSKKFKVLGNTDRHSIKKNLIGALLFDSGETAEATRLKRTARRRYTRRKNRICYLQEIFSNEMAKVDDSFFHRLEESFLVEEDKKHERHPIFGNIVDEVAYHEKYPTIYHLRKKLVDSTDKADLRLIYLALAHMIKFRGHFLIEGDLNPDNSDVDKLFIQLVQTYNQLFEENPINASGVDAKAILSARLSKSRRLENLIAQLPGEKKNGLFGNLIALSLGLTPNFKSNFDLAEDAKLQLSKDTYDDDLDNLLAQIGDQYADLFLAAKNLSDAILLSDILRVNTEITKAPLSASMIKRYDEHHQDLTLLKALVRQQLPEKYKEIFFDQSKNGYAGYIDGGASQEEFYKFIKPILEKMDGTEELLVKLNREDLLRKQRTFDNGSIPHQIHLGELHAILRRQEDFYPFLKDNREKIEKILTFRIPYYVGPLARGNSRFAWMTRKSEETITPWNFEEVVDKGASAQSFIERMTNFDKNLPNEKVLPKHSLLYEYFTVYNELTKVKYVTEGMRKPAFLSGEQKKAIVDLLFKTNRKVTVKQLKEDYFKKIECFDSVEISGVEDRFNASLGTYHDLLKIIKDKDFLDNEENEDILEDIVLTLTLFEDREMIEERLKTYAHLFDDKVMKQLKRRRYTGWGRLSRKLINGIRDKQSGKTILDFLKSDGFANRNFMQLIHDDSLTFKEDIQKAQVSGQGDSLHEHIANLAGSPAIKKGILQTVKVVDELVKVMGRHKPENIVIEMARENQTTQKGQKNSRERMKRIEEGIKELGSQILKEHPVENTQLQNEKLYLYYLQNGRDMYVDQELDINRLSDYDVDHIVPQSFLKDDSIDNKVLTRSDKARGKSDNVPSEEVVKKMKNYWRQLLNAKLITQRKFDNLTKAERGGLSELDKAGFIKRQLVETRQITKHVAQILDSRMNTKYDENDKLIREVKVITLKSKLVSDFRKDFQFYKVREINNYHHAHDAYLNAVVGTALIKKYPKLESEFVYGDYKVYDVRKMIAKSEQEIGKATAKYFFYSNIMNFFKTEITLANGEIRKRPLIETNGETGEIVWDKGRDFATVRKVLSMPQVNIVKKTEVQTGGFSKESILPKRNSDKLIARKKDWDPKKYGGFDSPTVAYSVLVVAKVEKGKSKKLKSVKELLGITIMERSSFEKNPIDFLEAKGYKEVKKDLIIKLPKYSLFELENGRKRMLASAGELQKGNELALPSKYVNFLYLASHYEKLKGSPEDNEQKQLFVEQHKHYLDEIIEQISEFSKRVILADANLDKVLSAYNKHRDKPIREQAENIIHLFTLTNLGAPAAFKYFDTTIDRKRYTSTKEVLDATLIHQSITGLYETRIDLSQLGGDGGGGSPAPGGGGGGVLDTPPSHIGLEHLPPPPEVPQFPLNLERLQALQDLVHRSLEAGYISPWDGPGNNPVFPVRKPNGAWRFVHDLRATNALTKPIPALSPGPPDLTAPPTHPPHIICLDLKDAFFQIPVEDRFRFYLSFTLPSPGGLQPHRRFAWRVLPQGFINSPALFQRALQEPLRQVSAAFSQSLLVSYMDDILYASPTEEQRSQCYQALAARLRDLGFQVASEKTSQTPSPVPFLGQMVHEQIVTYQSLPTLQISSPISLHQLQAVLGDLQWVSRGTPTTRRPLQLLYSSLKRHHDPRAIIQLSPEQLQGIAELRQALSHNARSRYNEQEPLLAYVHLTRAGSTLVLFQKGAQFPLAYFQTPLTDNQASPWGLLLLLGCQYLQTQALSSYAKPILKYYHNLPKTSLDNWIQSSEDPRVQELLQLWPQISSQGIQPPGPWKTLITRAEVFLTPQFSPDPIPAALCLFSDGATGRGAYCLWKDHLLDFQAVPAPESAQKGELAGLLAGLAAAPPEPVNIWVDSKYLYSLLRTWVLGAWLQPDPVPSYALLYKSLLRHPAIVVGHVRSHSSASHPIASLNNYVDQLAGKRTADGSEFEKRTADGSEFESPKKKAKVEGSGEGRGSLLTCGDVEENPG

SEQ ID NO: 3741 - protein, 2056 aa, synthetic construct
MPAAKRVKLDGGDKKYSIGLDIGTNSVGWAVITDEYKVPSKKFKVLGNTDRHSIKKNLIGALLFDSGETAEATRLKRTARRRYTRRKNRICYLQEIFSNEMAKVDDSFFHRLEESFLVEEDKKHERHPIFGNIVDEVAYHEKYPTIYHLRKKLVDSTDKADLRLIYLALAHMIKFRGHFLIEGDLNPDNSDVDKLFIQLVQTYNQLFEENPINASGVDAKAILSARLSKSRRLENLIAQLPGEKKNGLFGNLIALSLGLTPNFKSNFDLAEDAKLQLSKDTYDDDLDNLLAQIGDQYADLFLAAKNLSDAILLSDILRVNTEITKAPLSASMIKRYDEHHQDLTLLKALVRQQLPEKYKEIFFDQSKNGYAGYIDGGASQEEFYKFIKPILEKMDGTEELLVKLNREDLLRKQRTFDNGSIPHQIHLGELHAILRRQEDFYPFLKDNREKIEKILTFRIPYYVGPLARGNSRFAWMTRKSEETITPWNFEEVVDKGASAQSFIERMTNFDKNLPNEKVLPKHSLLYEYFTVYNELTKVKYVTEGMRKPAFLSGEQKKAIVDLLFKTNRKVTVKQLKEDYFKKIECFDSVEISGVEDRFNASLGTYHDLLKIIKDKDFLDNEENEDILEDIVLTLTLFEDREMIEERLKTYAHLFDDKVMKQLKRRRYTGWGRLSRKLINGIRDKQSGKTILDFLKSDGFANRNFMQLIHDDSLTFKEDIQKAQVSGQGDSLHEHIANLAGSPAIKKGILQTVKVVDELVKVMGRHKPENIVIEMARENQTTQKGQKNSRERMKRIEEGIKELGSQILKEHPVENTQLQNEKLYLYYLQNGRDMYVDQELDINRLSDYDVDHIVPQSFLKDDSIDNKVLTRSDKARGKSDNVPSEEVVKKMKNYWRQLLNAKLITQRKFDNLTKAERGGLSELDKAGFIKRQLVETRQITKHVAQILDSRMNTKYDENDKLIREVKVITLKSKLVSDFRKDFQFYKVREINNYHHAHDAYLNAVVGTALIKKYPKLESEFVYGDYKVYDVRKMIAKSEQEIGKATAKYFFYSNIMNFFKTEITLANGEIRKRPLIETNGETGEIVWDKGRDFATVRKVLSMPQVNIVKKTEVQTGGFSKESILPKRNSDKLIARKKDWDPKKYGGFDSPTVAYSVLVVAKVEKGKSKKLKSVKELLGITIMERSSFEKNPIDFLEAKGYKEVKKDLIIKLPKYSLFELENGRKRMLASAGELQKGNELALPSKYVNFLYLASHYEKLKGSPEDNEQKQLFVEQHKHYLDEIIEQISEFSKRVILADANLDKVLSAYNKHRDKPIREQAENIIHLFTLTNLGAPAAFKYFDTTIDRKRYTSTKEVLDATLIHQSITGLYETRIDLSQLGGDGGAEAAAKEAAAKEAAAKEAAAKALEAEAAAKEAAAKEAAAKEAAAKAGGGVLDTPPSHIGLEHLPPPPEVPQFPLNLERLQALQDLVHRSLEAGYISPWDGPGNNPVFPVRKPNGAWRFVHDLRATNALTKPIPALSPGPPDLTAPPTHPPHIICLDLKDAFFQIPVEDRFRFYLSFTLPSPGGLQPHRRFAWRVLPQGFINSPALFQRALQEPLRQVSAAFSQSLLVSYMDDILYASPTEEQRSQCYQALAARLRDLGFQVASEKTSQTPSPVPFLGQMVHEQIVTYQSLPTLQISSPISLHQLQAVLGDLQWVSRGTPTTRRPLQLLYSSLKRHHDPRAIIQLSPEQLQGIAELRQALSHNARSRYNEQEPLLAYVHLTRAGSTLVLFQKGAQFPLAYFQTPLTDNQASPWGLLLLLGCQYLQTQALSSYAKPILKYYHNLPKTSLDNWIQSSEDPRVQELLQLWPQISSQGIQPPGPWKTLITRAEVFLTPQFSPDPIPAALCLFSDGATGRGAYCLWKDHLLDFQAVPAPESAQKGELAGLLAGLAAAPPEPVNIWVDSKYLYSLLRTWVLGAWLQPDPVPSYALLYKSLLRHPAIVVGHVRSHSSASHPIASLNNYVDQLAGKRTADGSEFEKRTADGSEFESPKKKAKVEGSGEGRGSLLTCGDVEENPG

SEQ ID NO: 3742 - protein, 2027 aa, synthetic construct
MAPKKKRKVGIHGVPAADKKYSIGLDIGTNSVGWAVITDEYKVPSKKFKVLGNTDRHSIKKNLIGALLFDSGETAEATRLKRTARRRYTRRKNRICYLQEIFSNEMAKVDDSFFHRLEESFLVEEDKKHERHPIFGNIVDEVAYHEKYPTIYHLRKKLVDSTDKADLRLIYLALAHMIKFRGHFLIEGDLNPDNSDVDKLFIQLVQTYNQLFEENPINASGVDAKAILSARLSKSRRLENLIAQLPGEKKNGLFGNLIALSLGLTPNFKSNFDLAEDAKLQLSKDTYDDDLDNLLAQIGDQYADLFLAAKNLSDAILLSDILRVNTEITKAPLSASMIKRYDEHHQDLTLLKALVRQQLPEKYKEIFFDQSKNGYAGYIDGGASQEEFYKFIKPILEKMDGTEELLVKLNREDLLRKQRTFDNGSIPHQIHLGELHAILRRQEDFYPFLKDNREKIEKILTFRIPYYVGPLARGNSRFAWMTRKSEETITPWNFEEVVDKGASAQSFIERMTNFDKNLPNEKVLPKHSLLYEYFTVYNELTKVKYVTEGMRKPAFLSGEQKKAIVDLLFKTNRKVTVKQLKEDYFKKIECFDSVEISGVEDRFNASLGTYHDLLKIIKDKDFLDNEENEDILEDIVLTLTLFEDREMIEERLKTYAHLFDDKVMKQLKRRRYTGWGRLSRKLINGIRDKQSGKTILDFLKSDGFANRNFMQLIHDDSLTFKEDIQKAQVSGQGDSLHEHIANLAGSPAIKKGILQTVKVVDELVKVMGRHKPENIVIEMARENQTTQKGQKNSRERMKRIEEGIKELGSQILKEHPVENTQLQNEKLYLYYLQNGRDMYVDQELDINRLSDYDVDHIVPQSFLKDDSIDNKVLTRSDKARGKSDNVPSEEVVKKMKNYWRQLLNAKLITQRKFDNLTKAERGGLSELDKAGFIKRQLVETRQITKHVAQILDSRMNTKYDENDKLIREVKVITLKSKLVSDFRKDFQFYKVREINNYHHAHDAYLNAVVGTALIKKYPKLESEFVYGDYKVYDVRKMIAKSEQEIGKATAKYFFYSNIMNFFKTEITLANGEIRKRPLIETNGETGEIVWDKGRDFATVRKVLSMPQVNIVKKTEVQTGGFSKESILPKRNSDKLIARKKDWDPKKYGGFDSPTVAYSVLVVAKVEKGKSKKLKSVKELLGITIMERSSFEKNPIDFLEAKGYKEVKKDLIIKLPKYSLFELENGRKRMLASAGELQKGNELALPSKYVNFLYLASHYEKLKGSPEDNEQKQLFVEQHKHYLDEIIEQISEFSKRVILADANLDKVLSAYNKHRDKPIREQAENIIHLFTLTNLGAPAAFKYFDTTIDRKRYTSTKEVLDATLIHQSITGLYETRIDLSQLGGDSGGSSGGSSGSETPGTSESATPESSGGSSGGSSNQVGHRKIRPHNIATGDYPPRPQKQYPINPKAKPSIQIVIDDLLKQGVLTPQNSTMNTPVYPVPKPDGRWRMVLDYREVNKTIPLTAAQNQHSAGILATIVRQKYKTTLDLANGFWAHPITPESYWLTAFTWQGKQYCWTRLPQGFLNSPALFNADVVDLLKEIPNVQVYVDDIYLSHDDPKEHVQQLEKVFQILLQAGYVVSLKKSEIGQKTVEFLGFNITKEGRGLTDTFKTKLLNITPPKDLKQLQSILGKLNFARNFIPNFAELVQPLYNLIASAKGKYIEWSEENTKQLNMVIEALNTASNLEERLPEQRLVIKVNTSPSAGYVRYYNETGKKPIMYLNYVFSKAELKFSMLEKLLTTMHKALIKAMDLAMGQEILVYSPIVSMTKIQKTPLPERKALPIRWITWMTYLEDPRIQFHYDKTLPELKHIPDVYTSSQSPVKHPSQYEGVFYTDGSAIKSPDPTKSNNAGMGIVHATYKPEYQVLNQWSIPLGNHTAQMAEIAAVEFACKKALKIPGPVLVITDSFYVAESANKELPYWKSNGFVNNKKKPLKHISKWKSIAECLSMKPDITIQHEKGISLQIPVFILKGNALADKLATQGSYVVNC

SEQ ID NO: 3743 - protein, 2050 aa, synthetic construct
MKRTADGSEFESPKKKRKVDKKYSIGLDIGTNSVGWAVITDEYKVPSKKFKVLGNTDRHSIKKNLIGALLFDSGETAEATRLKRTARRRYTRRKNRICYLQEIFSNEMAKVDDSFFHRLEESFLVEEDKKHERHPIFGNIVDEVAYHEKYPTIYHLRKKLVDSTDKADLRLIYLALAHMIKFRGHFLIEGDLNPDNSDVDKLFIQLVQTYNQLFEENPINASGVDAKAILSARLSKSRRLENLIAQLPGEKKNGLFGNLIALSLGLTPNFKSNFDLAEDAKLQLSKDTYDDDLDNLLAQIGDQYADLFLAAKNLSDAILLSDILRVNTEITKAPLSASMIKRYDEHHQDLTLLKALVRQQLPEKYKEIFFDQSKNGYAGYIDGGASQEEFYKFIKPILEKMDGTEELLVKLNREDLLRKQRTFDNGSIPHQIHLGELHAILRRQEDFYPFLKDNREKIEKILTFRIPYYVGPLARGNSRFAWMTRKSEETITPWNFEEVVDKGASAQSFIERMTNFDKNLPNEKVLPKHSLLYEYFTVYNELTKVKYVTEGMRKPAFLSGEQKKAIVDLLFKTNRKVTVKQLKEDYFKKIECFDSVEISGVEDRFNASLGTYHDLLKIIKDKDFLDNEENEDILEDIVLTLTLFEDREMIEERLKTYAHLFDDKVMKQLKRRRYTGWGRLSRKLINGIRDKQSGKTILDFLKSDGFANRNFMQLIHDDSLTFKEDIQKAQVSGQGDSLHEHIANLAGSPAIKKGILQTVKVVDELVKVMGRHKPENIVIEMARENQTTQKGQKNSRERMKRIEEGIKELGSQILKEHPVENTQLQNEKLYLYYLQNGRDMYVDQELDINRLSDYDVDHIVPQSFLKDDSIDNKVLTRSDKARGKSDNVPSEEVVKKMKNYWRQLLNAKLITQRKFDNLTKAERGGLSELDKAGFIKRQLVETRQITKHVAQILDSRMNTKYDENDKLIREVKVITLKSKLVSDFRKDFQFYKVREINNYHHAHDAYLNAVVGTALIKKYPKLESEFVYGDYKVYDVRKMIAKSEQEIGKATAKYFFYSNIMNFFKTEITLANGEIRKRPLIETNGETGEIVWDKGRDFATVRKVLSMPQVNIVKKTEVQTGGFSKESILPKRNSDKLIARKKDWDPKKYGGFDSPTVAYSVLVVAKVEKGKSKKLKSVKELLGITIMERSSFEKNPIDFLEAKGYKEVKKDLIIKLPKYSLFELENGRKRMLASAGELQKGNELALPSKYVNFLYLASHYEKLKGSPEDNEQKQLFVEQHKHYLDEIIEQISEFSKRVILADANLDKVLSAYNKHRDKPIREQAENIIHLFTLTNLGAPAAFKYFDTTIDRKRYTSTKEVLDATLIHQSITGLYETRIDLSQLGGDSGGSSGGSSGSETPGTSESATPESSGGSSGGSSNQVGHRKIRPHNIATGDYPPRPQKQYPINPKAKPSIQIVIDDLLKQGVLTPQNSTMNTPVYPVPKPDGRWRMVLDYREVNKTIPLTAAQNQHSAGILATIVRQKYKTTLDLANGFWAHPITPESYWLTAFTWQGKQYCWTRLPQGFLNSPALFNADVVDLLKEIPNVQVYVDDIYLSHDDPKEHVQQLEKVFQILLQAGYVVSLKKSEIGQKTVEFLGFNITKEGRGLTDTFKTKLLNITPPKDLKQLQSILGKLNFARNFIPNFAELVQPLYNLIASAKGKYIEWSEENTKQLNMVIEALNTASNLEERLPEQRLVIKVNTSPSAGYVRYYNETGKKPIMYLNYVFSKAELKFSMLEKLLTTMHKALIKAMDLAMGQEILVYSPIVSMTKIQKTPLPERKALPIRWITWMTYLEDPRIQFHYDKTLPELKHIPDVYTSSQSPVKHPSQYEGVFYTDGSAIKSPDPTKSNNAGMGIVHATYKPEYQVLNQWSIPLGNHTAQMAEIAAVEFACKKALKIPGPVLVITDSFYVAESANKELPYWKSNGFVNNKKKPLKHISKWKSIAECLSMKPDITIQHEKGISLQIPVFILKGNALADKLATQGSYVVNCSGGSKRTADGSEFEPKKKRKV

SEQ ID NO: 3744 - protein, 2055 aa, synthetic construct
MPAAKRVKLDGGDKKYSIGLDIGTNSVGWAVITDEYKVPSKKFKVLGNTDRHSIKKNLIGALLFDSGETAEATRLKRTARRRYTRRKNRICYLQEIFSNEMAKVDDSFFHRLEESFLVEEDKKHERHPIFGNIVDEVAYHEKYPTIYHLRKKLVDSTDKADLRLIYLALAHMIKFRGHFLIEGDLNPDNSDVDKLFIQLVQTYNQLFEENPINASGVDAKAILSARLSKSRRLENLIAQLPGEKKNGLFGNLIALSLGLTPNFKSNFDLAEDAKLQLSKDTYDDDLDNLLAQIGDQYADLFLAAKNLSDAILLSDILRVNTEITKAPLSASMIKRYDEHHQDLTLLKALVRQQLPEKYKEIFFDQSKNGYAGYIDGGASQEEFYKFIKPILEKMDGTEELLVKLNREDLLRKQRTFDNGSIPHQIHLGELHAILRRQEDFYPFLKDNREKIEKILTFRIPYYVGPLARGNSRFAWMTRKSEETITPWNFEEVVDKGASAQSFIERMTNFDKNLPNEKVLPKHSLLYEYFTVYNELTKVKYVTEGMRKPAFLSGEQKKAIVDLLFKTNRKVTVKQLKEDYFKKIECFDSVEISGVEDRFNASLGTYHDLLKIIKDKDFLDNEENEDILEDIVLTLTLFEDREMIEERLKTYAHLFDDKVMKQLKRRRYTGWGRLSRKLINGIRDKQSGKTILDFLKSDGFANRNFMQLIHDDSLTFKEDIQKAQVSGQGDSLHEHIANLAGSPAIKKGILQTVKVVDELVKVMGRHKPENIVIEMARENQTTQKGQKNSRERMKRIEEGIKELGSQILKEHPVENTQLQNEKLYLYYLQNGRDMYVDQELDINRLSDYDVDHIVPQSFLKDDSIDNKVLTRSDKARGKSDNVPSEEVVKKMKNYWRQLLNAKLITQRKFDNLTKAERGGLSELDKAGFIKRQLVETRQITKHVAQILDSRMNTKYDENDKLIREVKVITLKSKLVSDFRKDFQFYKVREINNYHHAHDAYLNAVVGTALIKKYPKLESEFVYGDYKVYDVRKMIAKSEQEIGKATAKYFFYSNIMNFFKTEITLANGEIRKRPLIETNGETGEIVWDKGRDFATVRKVLSMPQVNIVKKTEVQTGGFSKESILPKRNSDKLIARKKDWDPKKYGGFDSPTVAYSVLVVAKVEKGKSKKLKSVKELLGITIMERSSFEKNPIDFLEAKGYKEVKKDLIIKLPKYSLFELENGRKRMLASAGELQKGNELALPSKYVNFLYLASHYEKLKGSPEDNEQKQLFVEQHKHYLDEIIEQISEFSKRVILADANLDKVLSAYNKHRDKPIREQAENIIHLFTLTNLGAPAAFKYFDTTIDRKRYTSTKEVLDATLIHQSITGLYETRIDLSQLGGDSGGSSGGSSGSETPGTSESATPESSGGSSGGSSNQVGHRKIRPHNIATGDYPPRPQKQYPINPKAKPSIQIVIDDLLKQGVLTPQNSTMNTPVYPVPKPDGRWRMVLDYREVNKTIPLTAAQNQHSAGILATIVRQKYKTTLDLANGFWAHPITPESYWLTAFTWQGKQYCWTRLPQGFLNSPALFNADVVDLLKEIPNVQVYVDDIYLSHDDPKEHVQQLEKVFQILLQAGYVVSLKKSEIGQKTVEFLGFNITKEGRGLTDTFKTKLLNITPPKDLKQLQSILGKLNFARNFIPNFAELVQPLYNLIASAKGKYIEWSEENTKQLNMVIEALNTASNLEERLPEQRLVIKVNTSPSAGYVRYYNETGKKPIMYLNYVFSKAELKFSMLEKLLTTMHKALIKAMDLAMGQEILVYSPIVSMTKIQKTPLPERKALPIRWITWMTYLEDPRIQFHYDKTLPELKHIPDVYTSSQSPVKHPSQYEGVFYTDGSAIKSPDPTKSNNAGMGIVHATYKPEYQVLNQWSIPLGNHTAQMAEIAAVEFACKKALKIPGPVLVITDSFYVAESANKELPYWKSNGFVNNKKKPLKHISKWKSIAECLSMKPDITIQHEKGISLQIPVFILKGNALADKLATQGSYVVNCSGGSKRTADGSEFEKRTADGSEFESPKKKAKVE

SEQ ID NO: 3745 - protein, 2129 aa, synthetic construct
MPAAKRVKLDGGDKKYSIGLDIGTNSVGWAVITDEYKVPSKKFKVLGNTDRHSIKKNLIGALLFDSGETAEATRLKRTARRRYTRRKNRICYLQEIFSNEMAKVDDSFFHRLEESFLVEEDKKHERHPIFGNIVDEVAYHEKYPTIYHLRKKLVDSTDKADLRLIYLALAHMIKFRGHFLIEGDLNPDNSDVDKLFIQLVQTYNQLFEENPINASGVDAKAILSARLSKSRRLENLIAQLPGEKKNGLFGNLIALSLGLTPNFKSNFDLAEDAKLQLSKDTYDDDLDNLLAQIGDQYADLFLAAKNLSDAILLSDILRVNTEITKAPLSASMIKRYDEHHQDLTLLKALVRQQLPEKYKEIFFDQSKNGYAGYIDGGASQEEFYKFIKPILEKMDGTEELLVKLNREDLLRKQRTFDNGSIPHQIHLGELHAILRRQEDFYPFLKDNREKIEKILTFRIPYYVGPLARGNSRFAWMTRKSEETITPWNFEEVVDKGASAQSFIERMTNFDKNLPNEKVLPKHSLLYEYFTVYNELTKVKYVTEGMRKPAFLSGEQKKAIVDLLFKTNRKVTVKQLKEDYFKKIECFDSVEISGVEDRFNASLGTYHDLLKIIKDKDFLDNEENEDILEDIVLTLTLFEDREMIEERLKTYAHLFDDKVMKQLKRRRYTGWGRLSRKLINGIRDKQSGKTILDFLKSDGFANRNFMQLIHDDSLTFKEDIQKAQVSGQGDSLHEHIANLAGSPAIKKGILQTVKVVDELVKVMGRHKPENIVIEMARENQTTQKGQKNSRERMKRIEEGIKELGSQILKEHPVENTQLQNEKLYLYYLQNGRDMYVDQELDINRLSDYDVDHIVPQSFLKDDSIDNKVLTRSDKARGKSDNVPSEEVVKKMKNYWRQLLNAKLITQRKFDNLTKAERGGLSELDKAGFIKRQLVETRQITKHVAQILDSRMNTKYDENDKLIREVKVITLKSKLVSDFRKDFQFYKVREINNYHHAHDAYLNAVVGTALIKKYPKLESEFVYGDYKVYDVRKMIAKSEQEIGKATAKYFFYSNIMNFFKTEITLANGEIRKRPLIETNGETGEIVWDKGRDFATVRKVLSMPQVNIVKKTEVQTGGFSKESILPKRNSDKLIARKKDWDPKKYGGFDSPTVAYSVLVVAKVEKGKSKKLKSVKELLGITIMERSSFEKNPIDFLEAKGYKEVKKDLIIKLPKYSLFELENGRKRMLASAGELQKGNELALPSKYVNFLYLASHYEKLKGSPEDNEQKQLFVEQHKHYLDEIIEQISEFSKRVILADANLDKVLSAYNKHRDKPIREQAENIIHLFTLTNLGAPAAFKYFDTTIDRKRYTSTKEVLDATLIHQSITGLYETRIDLSQLGGDGGSGGSSGGSSGSETPGTSESATPESSGGSSGGSSGGVPWLTQQPLQLTILVPLQEYQEKILSKTALPEDQKQQLKTLFVKYDNLWQHWENQVGHRKIRPHNIATGDYPPRPQKQYPINPKAKPSIQIVIDDLLKQGVLTPQNSTMNTPVYPVPKPDGRWRMVLDYREVNKTIPLTAAQNQHSAGILATIVRQKYKTTLDLANGFWAHPITPESYWLTAFTWQGKQYCWTRLPQGFLNSPALFNADVVDLLKEIPNVQVYVDDIYLSHDDPKEHVQQLEKVFQILLQAGYVVSLKKSEIGQKTVEFLGFNITKEGRGLTDTFKTKLLNITPPKDLKQLQSILGKLNFARNFIPNFAELVQPLYNLIAPAKGKYIEWSEENTKQLNMVIEALNTASNLEERLPEQRLVIKVNTSPSAGYVRYYNETGKKPIMYLNYVFSKAELKFSMLEKLLTTMHKALIKAMDLAMGQEILVYSPIVSMTKIQKTPLPERKALPIRWITWMTYLEDPRIQFHYDKTLPELKHIPDVYTSSQSPVKHPSQYEGVFYTDGSAIKSPDPTKSNNAGMGIVHATYKPEYQVLNQWSIPLGNHTAQMAEIAAVEFACKKALKIPGPVLVITDSFYVAESANKELPYWKSNGFVNNKKKPLKHISKWKSIAECLSMKPDITIQHEKGISLQIPVFILKGNALADKLATQGSYVVNAGKRTADGSEFEKRTADGSEFESPKKKAKVEGSGEGRGSLLTCGDVEENPG

SEQ ID NO: 3746 - protein, 2107 aa, synthetic construct
MPAAKRVKLDGGDKKYSIGLDIGTNSVGWAVITDEYKVPSKKFKVLGNTDRHSIKKNLIGALLFDSGETAEATRLKRTARRRYTRRKNRICYLQEIFSNEMAKVDDSFFHRLEESFLVEEDKKHERHPIFGNIVDEVAYHEKYPTIYHLRKKLVDSTDKADLRLIYLALAHMIKFRGHFLIEGDLNPDNSDVDKLFIQLVQTYNQLFEENPINASGVDAKAILSARLSKSRRLENLIAQLPGEKKNGLFGNLIALSLGLTPNFKSNFDLAEDAKLQLSKDTYDDDLDNLLAQIGDQYADLFLAAKNLSDAILLSDILRVNTEITKAPLSASMIKRYDEHHQDLTLLKALVRQQLPEKYKEIFFDQSKNGYAGYIDGGASQEEFYKFIKPILEKMDGTEELLVKLNREDLLRKQRTFDNGSIPHQIHLGELHAILRRQEDFYPFLKDNREKIEKILTFRIPYYVGPLARGNSRFAWMTRKSEETITPWNFEEVVDKGASAQSFIERMTNFDKNLPNEKVLPKHSLLYEYFTVYNELTKVKYVTEGMRKPAFLSGEQKKAIVDLLFKTNRKVTVKQLKEDYFKKIECFDSVEISGVEDRFNASLGTYHDLLKIIKDKDFLDNEENEDILEDIVLTLTLFEDREMIEERLKTYAHLFDDKVMKQLKRRRYTGWGRLSRKLINGIRDKQSGKTILDFLKSDGFANRNFMQLIHDDSLTFKEDIQKAQVSGQGDSLHEHIANLAGSPAIKKGILQTVKVVDELVKVMGRHKPENIVIEMARENQTTQKGQKNSRERMKRIEEGIKELGSQILKEHPVENTQLQNEKLYLYYLQNGRDMYVDQELDINRLSDYDVDHIVPQSFLKDDSIDNKVLTRSDKARGKSDNVPSEEVVKKMKNYWRQLLNAKLITQRKFDNLTKAERGGLSELDKAGFIKRQLVETRQITKHVAQILDSRMNTKYDENDKLIREVKVITLKSKLVSDFRKDFQFYKVREINNYHHAHDAYLNAVVGTALIKKYPKLESEFVYGDYKVYDVRKMIAKSEQEIGKATAKYFFYSNIMNFFKTEITLANGEIRKRPLIETNGETGEIVWDKGRDFATVRKVLSMPQVNIVKKTEVQTGGFSKESILPKRNSDKLIARKKDWDPKKYGGFDSPTVAYSVLVVAKVEKGKSKKLKSVKELLGITIMERSSFEKNPIDFLEAKGYKEVKKDLIIKLPKYSLFELENGRKRMLASAGELQKGNELALPSKYVNFLYLASHYEKLKGSPEDNEQKQLFVEQHKHYLDEIIEQISEFSKRVILADANLDKVLSAYNKHRDKPIREQAENIIHLFTLTNLGAPAAFKYFDTTIDRKRYTSTKEVLDATLIHQSITGLYETRIDLSQLGGDGGPAPGGGEAAAKGGVPWLTQQPLQLTILVPLQEYQEKILSKTALPEDQKQQLKTLFVKYDNLWQHWENQVGHRKIRPHNIATGDYPPRPQKQYPINPKAKPSIQIVIDDLLKQGVLTPQNSTMNTPVYPVPKPDGRWRMVLDYREVNKTIPLTAAQNQHSAGILATIVRQKYKTTLDLANGFWAHPITPESYWLTAFTWQGKQYCWTRLPQGFLNSPALFNADVVDLLKEIPNVQVYVDDIYLSHDDPKEHVQQLEKVFQILLQAGYVVSLKKSEIGQKTVEFLGFNITKEGRGLTDTFKTKLLNITPPKDLKQLQSILGKLNFARNFIPNFAELVQPLYNLIAPAKGKYIEWSEENTKQLNMVIEALNTASNLEERLPEQRLVIKVNTSPSAGYVRYYNETGKKPIMYLNYVFSKAELKFSMLEKLLTTMHKALIKAMDLAMGQEILVYSPIVSMTKIQKTPLPERKALPIRWITWMTYLEDPRIQFHYDKTLPELKHIPDVYTSSQSPVKHPSQYEGVFYTDGSAIKSPDPTKSNNAGMGIVHATYKPEYQVLNQWSIPLGNHTAQMAEIAAVEFACKKALKIPGPVLVITDSFYVAESANKELPYWKSNGFVNNKKKPLKHISKWKSIAECLSMKPDITIQHEKGISLQIPVFILKGNALADKLATQGSYVVNAGKRTADGSEFEKRTADGSEFESPKKKAKVEGSGEGRGSLLTCGDVEENPG

SEQ ID NO: 3747 - protein, 2116 aa, synthetic construct
MPAAKRVKLDGGDKKYSIGLDIGTNSVGWAVITDEYKVPSKKFKVLGNTDRHSIKKNLIGALLFDSGETAEATRLKRTARRRYTRRKNRICYLQEIFSNEMAKVDDSFFHRLEESFLVEEDKKHERHPIFGNIVDEVAYHEKYPTIYHLRKKLVDSTDKADLRLIYLALAHMIKFRGHFLIEGDLNPDNSDVDKLFIQLVQTYNQLFEENPINASGVDAKAILSARLSKSRRLENLIAQLPGEKKNGLFGNLIALSLGLTPNFKSNFDLAEDAKLQLSKDTYDDDLDNLLAQIGDQYADLFLAAKNLSDAILLSDILRVNTEITKAPLSASMIKRYDEHHQDLTLLKALVRQQLPEKYKEIFFDQSKNGYAGYIDGGASQEEFYKFIKPILEKMDGTEELLVKLNREDLLRKQRTFDNGSIPHQIHLGELHAILRRQEDFYPFLKDNREKIEKILTFRIPYYVGPLARGNSRFAWMTRKSEETITPWNFEEVVDKGASAQSFIERMTNFDKNLPNEKVLPKHSLLYEYFTVYNELTKVKYVTEGMRKPAFLSGEQKKAIVDLLFKTNRKVTVKQLKEDYFKKIECFDSVEISGVEDRFNASLGTYHDLLKIIKDKDFLDNEENEDILEDIVLTLTLFEDREMIEERLKTYAHLFDDKVMKQLKRRRYTGWGRLSRKLINGIRDKQSGKTILDFLKSDGFANRNFMQLIHDDSLTFKEDIQKAQVSGQGDSLHEHIANLAGSPAIKKGILQTVKVVDELVKVMGRHKPENIVIEMARENQTTQKGQKNSRERMKRIEEGIKELGSQILKEHPVENTQLQNEKLYLYYLQNGRDMYVDQELDINRLSDYDVDHIVPQSFLKDDSIDNKVLTRSDKARGKSDNVPSEEVVKKMKNYWRQLLNAKLITQRKFDNLTKAERGGLSELDKAGFIKRQLVETRQITKHVAQILDSRMNTKYDENDKLIREVKVITLKSKLVSDFRKDFQFYKVREINNYHHAHDAYLNAVVGTALIKKYPKLESEFVYGDYKVYDVRKMIAKSEQEIGKATAKYFFYSNIMNFFKTEITLANGEIRKRPLIETNGETGEIVWDKGRDFATVRKVLSMPQVNIVKKTEVQTGGFSKESILPKRNSDKLIARKKDWDPKKYGGFDSPTVAYSVLVVAKVEKGKSKKLKSVKELLGITIMERSSFEKNPIDFLEAKGYKEVKKDLIIKLPKYSLFELENGRKRMLASAGELQKGNELALPSKYVNFLYLASHYEKLKGSPEDNEQKQLFVEQHKHYLDEIIEQISEFSKRVILADANLDKVLSAYNKHRDKPIREQAENIIHLFTLTNLGAPAAFKYFDTTIDRKRYTSTKEVLDATLIHQSITGLYETRIDLSQLGGDGGGGGGSGGGGSGGGGSGGGGSGGVPWLTQQPLQLTILVPLQEYQEKILSKTALPEDQKQQLKTLFVKYDNLWQHWENQVGHRKIRPHNIATGDYPPRPQKQYPINPKAKPSIQIVIDDLLKQGVLTPQNSTMNTPVYPVPKPDGRWRMVLDYREVNKTIPLTAAQNQHSAGILATIVRQKYKTTLDLANGFWAHPITPESYWLTAFTWQGKQYCWTRLPQGFLNSPALFNADVVDLLKEIPNVQVYVDDIYLSHDDPKEHVQQLEKVFQILLQAGYVVSLKKSEIGQKTVEFLGFNITKEGRGLTDTFKTKLLNITPPKDLKQLQSILGKLNFARNFIPNFAELVQPLYNLIAPAKGKYIEWSEENTKQLNMVIEALNTASNLEERLPEQRLVIKVNTSPSAGYVRYYNETGKKPIMYLNYVFSKAELKFSMLEKLLTTMHKALIKAMDLAMGQEILVYSPIVSMTKIQKTPLPERKALPIRWITWMTYLEDPRIQFHYDKTLPELKHIPDVYTSSQSPVKHPSQYEGVFYTDGSAIKSPDPTKSNNAGMGIVHATYKPEYQVLNQWSIPLGNHTAQMAEIAAVEFACKKALKIPGPVLVITDSFYVAESANKELPYWKSNGFVNNKKKPLKHISKWKSIAECLSMKPDITIQHEKGISLQIPVFILKGNALADKLATQGSYVVNAGKRTADGSEFEKRTADGSEFESPKKKAKVEGSGEGRGSLLTCGDVEENPG

SEQ ID NO: 3748 - protein, 2126 aa, synthetic construct
MPAAKRVKLDGGDKKYSIGLDIGTNSVGWAVITDEYKVPSKKFKVLGNTDRHSIKKNLIGALLFDSGETAEATRLKRTARRRYTRRKNRICYLQEIFSNEMAKVDDSFFHRLEESFLVEEDKKHERHPIFGNIVDEVAYHEKYPTIYHLRKKLVDSTDKADLRLIYLALAHMIKFRGHFLIEGDLNPDNSDVDKLFIQLVQTYNQLFEENPINASGVDAKAILSARLSKSRRLENLIAQLPGEKKNGLFGNLIALSLGLTPNFKSNFDLAEDAKLQLSKDTYDDDLDNLLAQIGDQYADLFLAAKNLSDAILLSDILRVNTEITKAPLSASMIKRYDEHHQDLTLLKALVRQQLPEKYKEIFFDQSKNGYAGYIDGGASQEEFYKFIKPILEKMDGTEELLVKLNREDLLRKQRTFDNGSIPHQIHLGELHAILRRQEDFYPFLKDNREKIEKILTFRIPYYVGPLARGNSRFAWMTRKSEETITPWNFEEVVDKGASAQSFIERMTNFDKNLPNEKVLPKHSLLYEYFTVYNELTKVKYVTEGMRKPAFLSGEQKKAIVDLLFKTNRKVTVKQLKEDYFKKIECFDSVEISGVEDRFNASLGTYHDLLKIIKDKDFLDNEENEDILEDIVLTLTLFEDREMIEERLKTYAHLFDDKVMKQLKRRRYTGWGRLSRKLINGIRDKQSGKTILDFLKSDGFANRNFMQLIHDDSLTFKEDIQKAQVSGQGDSLHEHIANLAGSPAIKKGILQTVKVVDELVKVMGRHKPENIVIEMARENQTTQKGQKNSRERMKRIEEGIKELGSQILKEHPVENTQLQNEKLYLYYLQNGRDMYVDQELDINRLSDYDVDHIVPQSFLKDDSIDNKVLTRSDKARGKSDNVPSEEVVKKMKNYWRQLLNAKLITQRKFDNLTKAERGGLSELDKAGFIKRQLVETRQITKHVAQILDSRMNTKYDENDKLIREVKVITLKSKLVSDFRKDFQFYKVREINNYHHAHDAYLNAVVGTALIKKYPKLESEFVYGDYKVYDVRKMIAKSEQEIGKATAKYFFYSNIMNFFKTEITLANGEIRKRPLIETNGETGEIVWDKGRDFATVRKVLSMPQVNIVKKTEVQTGGFSKESILPKRNSDKLIARKKDWDPKKYGGFDSPTVAYSVLVVAKVEKGKSKKLKSVKELLGITIMERSSFEKNPIDFLEAKGYKEVKKDLIIKLPKYSLFELENGRKRMLASAGELQKGNELALPSKYVNFLYLASHYEKLKGSPEDNEQKQLFVEQHKHYLDEIIEQISEFSKRVILADANLDKVLSAYNKHRDKPIREQAENIIHLFTLTNLGAPAAFKYFDTTIDRKRYTSTKEVLDATLIHQSITGLYETRIDLSQLGGDGGGGGGSGGGGSGGGGSGGGGSGGGGSGGGGSGGVPWLTQQPLQLTILVPLQEYQEKILSKTALPEDQKQQLKTLFVKYDNLWQHWENQVGHRKIRPHNIATGDYPPRPQKQYPINPKAKPSIQIVIDDLLKQGVLTPQNSTMNTPVYPVPKPDGRWRMVLDYREVNKTIPLTAAQNQHSAGILATIVRQKYKTTLDLANGFWAHPITPESYWLTAFTWQGKQYCWTRLPQGFLNSPALFNADVVDLLKEIPNVQVYVDDIYLSHDDPKEHVQQLEKVFQILLQAGYVVSLKKSEIGQKTVEFLGFNITKEGRGLTDTFKTKLLNITPPKDLKQLQSILGKLNFARNFIPNFAELVQPLYNLIAPAKGKYIEWSEENTKQLNMVIEALNTASNLEERLPEQRLVIKVNTSPSAGYVRYYNETGKKPIMYLNYVFSKAELKFSMLEKLLTTMHKALIKAMDLAMGQEILVYSPIVSMTKIQKTPLPERKALPIRWITWMTYLEDPRIQFHYDKTLPELKHIPDVYTSSQSPVKHPSQYEGVFYTDGSAIKSPDPTKSNNAGMGIVHATYKPEYQVLNQWSIPLGNHTAQMAEIAAVEFACKKALKIPGPVLVITDSFYVAESANKELPYWKSNGFVNNKKKPLKHISKWKSIAECLSMKPDITIQHEKGISLQIPVFILKGNALADKLATQGSYVVNAGKRTADGSEFEKRTADGSEFESPKKKAKVEGSGEGRGSLLTCGDVEENPG

SEQ ID NO: 3749 - protein, 2116 aa, synthetic construct
MPAAKRVKLDGGDKKYSIGLDIGTNSVGWAVITDEYKVPSKKFKVLGNTDRHSIKKNLIGALLFDSGETAEATRLKRTARRRYTRRKNRICYLQEIFSNEMAKVDDSFFHRLEESFLVEEDKKHERHPIFGNIVDEVAYHEKYPTIYHLRKKLVDSTDKADLRLIYLALAHMIKFRGHFLIEGDLNPDNSDVDKLFIQLVQTYNQLFEENPINASGVDAKAILSARLSKSRRLENLIAQLPGEKKNGLFGNLIALSLGLTPNFKSNFDLAEDAKLQLSKDTYDDDLDNLLAQIGDQYADLFLAAKNLSDAILLSDILRVNTEITKAPLSASMIKRYDEHHQDLTLLKALVRQQLPEKYKEIFFDQSKNGYAGYIDGGASQEEFYKFIKPILEKMDGTEELLVKLNREDLLRKQRTFDNGSIPHQIHLGELHAILRRQEDFYPFLKDNREKIEKILTFRIPYYVGPLARGNSRFAWMTRKSEETITPWNFEEVVDKGASAQSFIERMTNFDKNLPNEKVLPKHSLLYEYFTVYNELTKVKYVTEGMRKPAFLSGEQKKAIVDLLFKTNRKVTVKQLKEDYFKKIECFDSVEISGVEDRFNASLGTYHDLLKIIKDKDFLDNEENEDILEDIVLTLTLFEDREMIEERLKTYAHLFDDKVMKQLKRRRYTGWGRLSRKLINGIRDKQSGKTILDFLKSDGFANRNFMQLIHDDSLTFKEDIQKAQVSGQGDSLHEHIANLAGSPAIKKGILQTVKVVDELVKVMGRHKPENIVIEMARENQTTQKGQKNSRERMKRIEEGIKELGSQILKEHPVENTQLQNEKLYLYYLQNGRDMYVDQELDINRLSDYDVDHIVPQSFLKDDSIDNKVLTRSDKARGKSDNVPSEEVVKKMKNYWRQLLNAKLITQRKFDNLTKAERGGLSELDKAGFIKRQLVETRQITKHVAQILDSRMNTKYDENDKLIREVKVITLKSKLVSDFRKDFQFYKVREINNYHHAHDAYLNAVVGTALIKKYPKLESEFVYGDYKVYDVRKMIAKSEQEIGKATAKYFFYSNIMNFFKTEITLANGEIRKRPLIETNGETGEIVWDKGRDFATVRKVLSMPQVNIVKKTEVQTGGFSKESILPKRNSDKLIARKKDWDPKKYGGFDSPTVAYSVLVVAKVEKGKSKKLKSVKELLGITIMERSSFEKNPIDFLEAKGYKEVKKDLIIKLPKYSLFELENGRKRMLASAGELQKGNELALPSKYVNFLYLASHYEKLKGSPEDNEQKQLFVEQHKHYLDEIIEQISEFSKRVILADANLDKVLSAYNKHRDKPIREQAENIIHLFTLTNLGAPAAFKYFDTTIDRKRYTSTKEVLDATLIHQSITGLYETRIDLSQLGGDGGEAAAKEAAAKEAAAKEAAAKGGVPWLTQQPLQLTILVPLQEYQEKILSKTALPEDQKQQLKTLFVKYDNLWQHWENQVGHRKIRPHNIATGDYPPRPQKQYPINPKAKPSIQIVIDDLLKQGVLTPQNSTMNTPVYPVPKPDGRWRMVLDYREVNKTIPLTAAQNQHSAGILATIVRQKYKTTLDLANGFWAHPITPESYWLTAFTWQGKQYCWTRLPQGFLNSPALFNADVVDLLKEIPNVQVYVDDIYLSHDDPKEHVQQLEKVFQILLQAGYVVSLKKSEIGQKTVEFLGFNITKEGRGLTDTFKTKLLNITPPKDLKQLQSILGKLNFARNFIPNFAELVQPLYNLIAPAKGKYIEWSEENTKQLNMVIEALNTASNLEERLPEQRLVIKVNTSPSAGYVRYYNETGKKPIMYLNYVFSKAELKFSMLEKLLTTMHKALIKAMDLAMGQEILVYSPIVSMTKIQKTPLPERKALPIRWITWMTYLEDPRIQFHYDKTLPELKHIPDVYTSSQSPVKHPSQYEGVFYTDGSAIKSPDPTKSNNAGMGIVHATYKPEYQVLNQWSIPLGNHTAQMAEIAAVEFACKKALKIPGPVLVITDSFYVAESANKELPYWKSNGFVNNKKKPLKHISKWKSIAECLSMKPDITIQHEKGISLQIPVFILKGNALADKLATQGSYVVNAGKRTADGSEFEKRTADGSEFESPKKKAKVEGSGEGRGSLLTCGDVEENPG

SEQ ID NO: 3750 - protein, 2121 aa, synthetic construct
MPAAKRVKLDGGDKKYSIGLDIGTNSVGWAVITDEYKVPSKKFKVLGNTDRHSIKKNLIGALLFDSGETAEATRLKRTARRRYTRRKNRICYLQEIFSNEMAKVDDSFFHRLEESFLVEEDKKHERHPIFGNIVDEVAYHEKYPTIYHLRKKLVDSTDKADLRLIYLALAHMIKFRGHFLIEGDLNPDNSDVDKLFIQLVQTYNQLFEENPINASGVDAKAILSARLSKSRRLENLIAQLPGEKKNGLFGNLIALSLGLTPNFKSNFDLAEDAKLQLSKDTYDDDLDNLLAQIGDQYADLFLAAKNLSDAILLSDILRVNTEITKAPLSASMIKRYDEHHQDLTLLKALVRQQLPEKYKEIFFDQSKNGYAGYIDGGASQEEFYKFIKPILEKMDGTEELLVKLNREDLLRKQRTFDNGSIPHQIHLGELHAILRRQEDFYPFLKDNREKIEKILTFRIPYYVGPLARGNSRFAWMTRKSEETITPWNFEEVVDKGASAQSFIERMTNFDKNLPNEKVLPKHSLLYEYFTVYNELTKVKYVTEGMRKPAFLSGEQKKAIVDLLFKTNRKVTVKQLKEDYFKKIECFDSVEISGVEDRFNASLGTYHDLLKIIKDKDFLDNEENEDILEDIVLTLTLFEDREMIEERLKTYAHLFDDKVMKQLKRRRYTGWGRLSRKLINGIRDKQSGKTILDFLKSDGFANRNFMQLIHDDSLTFKEDIQKAQVSGQGDSLHEHIANLAGSPAIKKGILQTVKVVDELVKVMGRHKPENIVIEMARENQTTQKGQKNSRERMKRIEEGIKELGSQILKEHPVENTQLQNEKLYLYYLQNGRDMYVDQELDINRLSDYDVDHIVPQSFLKDDSIDNKVLTRSDKARGKSDNVPSEEVVKKMKNYWRQLLNAKLITQRKFDNLTKAERGGLSELDKAGFIKRQLVETRQITKHVAQILDSRMNTKYDENDKLIREVKVITLKSKLVSDFRKDFQFYKVREINNYHHAHDAYLNAVVGTALIKKYPKLESEFVYGDYKVYDVRKMIAKSEQEIGKATAKYFFYSNIMNFFKTEITLANGEIRKRPLIETNGETGEIVWDKGRDFATVRKVLSMPQVNIVKKTEVQTGGFSKESILPKRNSDKLIARKKDWDPKKYGGFDSPTVAYSVLVVAKVEKGKSKKLKSVKELLGITIMERSSFEKNPIDFLEAKGYKEVKKDLIIKLPKYSLFELENGRKRMLASAGELQKGNELALPSKYVNFLYLASHYEKLKGSPEDNEQKQLFVEQHKHYLDEIIEQISEFSKRVILADANLDKVLSAYNKHRDKPIREQAENIIHLFTLTNLGAPAAFKYFDTTIDRKRYTSTKEVLDATLIHQSITGLYETRIDLSQLGGDGGEAAAKEAAAKEAAAKEAAAKEAAAKGGVPWLTQQPLQLTILVPLQEYQEKILSKTALPEDQKQQLKTLFVKYDNLWQHWENQVGHRKIRPHNIATGDYPPRPQKQYPINPKAKPSIQIVIDDLLKQGVLTPQNSTMNTPVYPVPKPDGRWRMVLDYREVNKTIPLTAAQNQHSAGILATIVRQKYKTTLDLANGFWAHPITPESYWLTAFTWQGKQYCWTRLPQGFLNSPALFNADVVDLLKEIPNVQVYVDDIYLSHDDPKEHVQQLEKVFQILLQAGYVVSLKKSEIGQKTVEFLGFNITKEGRGLTDTFKTKLLNITPPKDLKQLQSILGKLNFARNFIPNFAELVQPLYNLIAPAKGKYIEWSEENTKQLNMVIEALNTASNLEERLPEQRLVIKVNTSPSAGYVRYYNETGKKPIMYLNYVFSKAELKFSMLEKLLTTMHKALIKAMDLAMGQEILVYSPIVSMTKIQKTPLPERKALPIRWITWMTYLEDPRIQFHYDKTLPELKHIPDVYTSSQSPVKHPSQYEGVFYTDGSAIKSPDPTKSNNAGMGIVHATYKPEYQVLNQWSIPLGNHTAQMAEIAAVEFACKKALKIPGPVLVITDSFYVAESANKELPYWKSNGFVNNKKKPLKHISKWKSIAECLSMKPDITIQHEKGISLQIPVFILKGNALADKLATQGSYVVNAGKRTADGSEFEKRTADGSEFESPKKKAKVEGSGEGRGSLLTCGDVEENPG

SEQ ID NO: 3751 - protein, 2105 aa, synthetic construct
MPAAKRVKLDGGDKKYSIGLDIGTNSVGWAVITDEYKVPSKKFKVLGNTDRHSIKKNLIGALLFDSGETAEATRLKRTARRRYTRRKNRICYLQEIFSNEMAKVDDSFFHRLEESFLVEEDKKHERHPIFGNIVDEVAYHEKYPTIYHLRKKLVDSTDKADLRLIYLALAHMIKFRGHFLIEGDLNPDNSDVDKLFIQLVQTYNQLFEENPINASGVDAKAILSARLSKSRRLENLIAQLPGEKKNGLFGNLIALSLGLTPNFKSNFDLAEDAKLQLSKDTYDDDLDNLLAQIGDQYADLFLAAKNLSDAILLSDILRVNTEITKAPLSASMIKRYDEHHQDLTLLKALVRQQLPEKYKEIFFDQSKNGYAGYIDGGASQEEFYKFIKPILEKMDGTEELLVKLNREDLLRKQRTFDNGSIPHQIHLGELHAILRRQEDFYPFLKDNREKIEKILTFRIPYYVGPLARGNSRFAWMTRKSEETITPWNFEEVVDKGASAQSFIERMTNFDKNLPNEKVLPKHSLLYEYFTVYNELTKVKYVTEGMRKPAFLSGEQKKAIVDLLFKTNRKVTVKQLKEDYFKKIECFDSVEISGVEDRFNASLGTYHDLLKIIKDKDFLDNEENEDILEDIVLTLTLFEDREMIEERLKTYAHLFDDKVMKQLKRRRYTGWGRLSRKLINGIRDKQSGKTILDFLKSDGFANRNFMQLIHDDSLTFKEDIQKAQVSGQGDSLHEHIANLAGSPAIKKGILQTVKVVDELVKVMGRHKPENIVIEMARENQTTQKGQKNSRERMKRIEEGIKELGSQILKEHPVENTQLQNEKLYLYYLQNGRDMYVDQELDINRLSDYDVDHIVPQSFLKDDSIDNKVLTRSDKARGKSDNVPSEEVVKKMKNYWRQLLNAKLITQRKFDNLTKAERGGLSELDKAGFIKRQLVETRQITKHVAQILDSRMNTKYDENDKLIREVKVITLKSKLVSDFRKDFQFYKVREINNYHHAHDAYLNAVVGTALIKKYPKLESEFVYGDYKVYDVRKMIAKSEQEIGKATAKYFFYSNIMNFFKTEITLANGEIRKRPLIETNGETGEIVWDKGRDFATVRKVLSMPQVNIVKKTEVQTGGFSKESILPKRNSDKLIARKKDWDPKKYGGFDSPTVAYSVLVVAKVEKGKSKKLKSVKELLGITIMERSSFEKNPIDFLEAKGYKEVKKDLIIKLPKYSLFELENGRKRMLASAGELQKGNELALPSKYVNFLYLASHYEKLKGSPEDNEQKQLFVEQHKHYLDEIIEQISEFSKRVILADANLDKVLSAYNKHRDKPIREQAENIIHLFTLTNLGAPAAFKYFDTTIDRKRYTSTKEVLDATLIHQSITGLYETRIDLSQLGGDGGGGSPAPGSSGGVPWLTQQPLQLTILVPLQEYQEKILSKTALPEDQKQQLKTLFVKYDNLWQHWENQVGHRKIRPHNIATGDYPPRPQKQYPINPKAKPSIQIVIDDLLKQGVLTPQNSTMNTPVYPVPKPDGRWRMVLDYREVNKTIPLTAAQNQHSAGILATIVRQKYKTTLDLANGFWAHPITPESYWLTAFTWQGKQYCWTRLPQGFLNSPALFNADVVDLLKEIPNVQVYVDDIYLSHDDPKEHVQQLEKVFQILLQAGYVVSLKKSEIGQKTVEFLGFNITKEGRGLTDTFKTKLLNITPPKDLKQLQSILGKLNFARNFIPNFAELVQPLYNLIAPAKGKYIEWSEENTKQLNMVIEALNTASNLEERLPEQRLVIKVNTSPSAGYVRYYNETGKKPIMYLNYVFSKAELKFSMLEKLLTTMHKALIKAMDLAMGQEILVYSPIVSMTKIQKTPLPERKALPIRWITWMTYLEDPRIQFHYDKTLPELKHIPDVYTSSQSPVKHPSQYEGVFYTDGSAIKSPDPTKSNNAGMGIVHATYKPEYQVLNQWSIPLGNHTAQMAEIAAVEFACKKALKIPGPVLVITDSFYVAESANKELPYWKSNGFVNNKKKPLKHISKWKSIAECLSMKPDITIQHEKGISLQIPVFILKGNALADKLATQGSYVVNAGKRTADGSEFEKRTADGSEFESPKKKAKVEGSGEGRGSLLTCGDVEENPG

SEQ ID NO: 3752 - protein, 2142 aa, synthetic construct
MPAAKRVKLDGGDKKYSIGLDIGTNSVGWAVITDEYKVPSKKFKVLGNTDRHSIKKNLIGALLFDSGETAEATRLKRTARRRYTRRKNRICYLQEIFSNEMAKVDDSFFHRLEESFLVEEDKKHERHPIFGNIVDEVAYHEKYPTIYHLRKKLVDSTDKADLRLIYLALAHMIKFRGHFLIEGDLNPDNSDVDKLFIQLVQTYNQLFEENPINASGVDAKAILSARLSKSRRLENLIAQLPGEKKNGLFGNLIALSLGLTPNFKSNFDLAEDAKLQLSKDTYDDDLDNLLAQIGDQYADLFLAAKNLSDAILLSDILRVNTEITKAPLSASMIKRYDEHHQDLTLLKALVRQQLPEKYKEIFFDQSKNGYAGYIDGGASQEEFYKFIKPILEKMDGTEELLVKLNREDLLRKQRTFDNGSIPHQIHLGELHAILRRQEDFYPFLKDNREKIEKILTFRIPYYVGPLARGNSRFAWMTRKSEETITPWNFEEVVDKGASAQSFIERMTNFDKNLPNEKVLPKHSLLYEYFTVYNELTKVKYVTEGMRKPAFLSGEQKKAIVDLLFKTNRKVTVKQLKEDYFKKIECFDSVEISGVEDRFNASLGTYHDLLKIIKDKDFLDNEENEDILEDIVLTLTLFEDREMIEERLKTYAHLFDDKVMKQLKRRRYTGWGRLSRKLINGIRDKQSGKTILDFLKSDGFANRNFMQLIHDDSLTFKEDIQKAQVSGQGDSLHEHIANLAGSPAIKKGILQTVKVVDELVKVMGRHKPENIVIEMARENQTTQKGQKNSRERMKRIEEGIKELGSQILKEHPVENTQLQNEKLYLYYLQNGRDMYVDQELDINRLSDYDVDHIVPQSFLKDDSIDNKVLTRSDKARGKSDNVPSEEVVKKMKNYWRQLLNAKLITQRKFDNLTKAERGGLSELDKAGFIKRQLVETRQITKHVAQILDSRMNTKYDENDKLIREVKVITLKSKLVSDFRKDFQFYKVREINNYHHAHDAYLNAVVGTALIKKYPKLESEFVYGDYKVYDVRKMIAKSEQEIGKATAKYFFYSNIMNFFKTEITLANGEIRKRPLIETNGETGEIVWDKGRDFATVRKVLSMPQVNIVKKTEVQTGGFSKESILPKRNSDKLIARKKDWDPKKYGGFDSPTVAYSVLVVAKVEKGKSKKLKSVKELLGITIMERSSFEKNPIDFLEAKGYKEVKKDLIIKLPKYSLFELENGRKRMLASAGELQKGNELALPSKYVNFLYLASHYEKLKGSPEDNEQKQLFVEQHKHYLDEIIEQISEFSKRVILADANLDKVLSAYNKHRDKPIREQAENIIHLFTLTNLGAPAAFKYFDTTIDRKRYTSTKEVLDATLIHQSITGLYETRIDLSQLGGDGGAEAAAKEAAAKEAAAKEAAAKALEAEAAAKEAAAKEAAAKEAAAKAGGVPWLTQQPLQLTILVPLQEYQEKILSKTALPEDQKQQLKTLFVKYDNLWQHWENQVGHRKIRPHNIATGDYPPRPQKQYPINPKAKPSIQIVIDDLLKQGVLTPQNSTMNTPVYPVPKPDGRWRMVLDYREVNKTIPLTAAQNQHSAGILATIVRQKYKTTLDLANGFWAHPITPESYWLTAFTWQGKQYCWTRLPQGFLNSPALFNADVVDLLKEIPNVQVYVDDIYLSHDDPKEHVQQLEKVFQILLQAGYVVSLKKSEIGQKTVEFLGFNITKEGRGLTDTFKTKLLNITPPKDLKQLQSILGKLNFARNFIPNFAELVQPLYNLIAPAKGKYIEWSEENTKQLNMVIEALNTASNLEERLPEQRLVIKVNTSPSAGYVRYYNETGKKPIMYLNYVFSKAELKFSMLEKLLTTMHKALIKAMDLAMGQEILVYSPIVSMTKIQKTPLPERKALPIRWITWMTYLEDPRIQFHYDKTLPELKHIPDVYTSSQSPVKHPSQYEGVFYTDGSAIKSPDPTKSNNAGMGIVHATYKPEYQVLNQWSIPLGNHTAQMAEIAAVEFACKKALKIPGPVLVITDSFYVAESANKELPYWKSNGFVNNKKKPLKHISKWKSIAECLSMKPDITIQHEKGISLQIPVFILKGNALADKLATQGSYVVNAGKRTADGSEFEKRTADGSEFESPKKKAKVEGSGEGRGSLLTCGDVEENPG

SEQ ID NO: 3753 - protein, 2002 aa, synthetic construct
MAPKKKRKVGIHGVPAADKKYSIGLDIGTNSVGWAVITDEYKVPSKKFKVLGNTDRHSIKKNLIGALLFDSGETAEATRLKRTARRRYTRRKNRICYLQEIFSNEMAKVDDSFFHRLEESFLVEEDKKHERHPIFGNIVDEVAYHEKYPTIYHLRKKLVDSTDKADLRLIYLALAHMIKFRGHFLIEGDLNPDNSDVDKLFIQLVQTYNQLFEENPINASGVDAKAILSARLSKSRRLENLIAQLPGEKKNGLFGNLIALSLGLTPNFKSNFDLAEDAKLQLSKDTYDDDLDNLLAQIGDQYADLFLAAKNLSDAILLSDILRVNTEITKAPLSASMIKRYDEHHQDLTLLKALVRQQLPEKYKEIFFDQSKNGYAGYIDGGASQEEFYKFIKPILEKMDGTEELLVKLNREDLLRKQRTFDNGSIPHQIHLGELHAILRRQEDFYPFLKDNREKIEKILTFRIPYYVGPLARGNSRFAWMTRKSEETITPWNFEEVVDKGASAQSFIERMTNFDKNLPNEKVLPKHSLLYEYFTVYNELTKVKYVTEGMRKPAFLSGEQKKAIVDLLFKTNRKVTVKQLKEDYFKKIECFDSVEISGVEDRFNASLGTYHDLLKIIKDKDFLDNEENEDILEDIVLTLTLFEDREMIEERLKTYAHLFDDKVMKQLKRRRYTGWGRLSRKLINGIRDKQSGKTILDFLKSDGFANRNFMQLIHDDSLTFKEDIQKAQVSGQGDSLHEHIANLAGSPAIKKGILQTVKVVDELVKVMGRHKPENIVIEMARENQTTQKGQKNSRERMKRIEEGIKELGSQILKEHPVENTQLQNEKLYLYYLQNGRDMYVDQELDINRLSDYDVDHIVPQSFLKDDSIDNKVLTRSDKARGKSDNVPSEEVVKKMKNYWRQLLNAKLITQRKFDNLTKAERGGLSELDKAGFIKRQLVETRQITKHVAQILDSRMNTKYDENDKLIREVKVITLKSKLVSDFRKDFQFYKVREINNYHHAHDAYLNAVVGTALIKKYPKLESEFVYGDYKVYDVRKMIAKSEQEIGKATAKYFFYSNIMNFFKTEITLANGEIRKRPLIETNGETGEIVWDKGRDFATVRKVLSMPQVNIVKKTEVQTGGFSKESILPKRNSDKLIARKKDWDPKKYGGFDSPTVAYSVLVVAKVEKGKSKKLKSVKELLGITIMERSSFEKNPIDFLEAKGYKEVKKDLIIKLPKYSLFELENGRKRMLASAGELQKGNELALPSKYVNFLYLASHYEKLKGSPEDNEQKQLFVEQHKHYLDEIIEQISEFSKRVILADANLDKVLSAYNKHRDKPIREQAENIIHLFTLTNLGAPAAFKYFDTTIDRKRYTSTKEVLDATLIHQSITGLYETRIDLSQLGGDSGGSSGGSSGSETPGTSESATPESSGGSSGGSSMEHLPRPPQISQFPLNPERLQALQHLVRKALEAGHIEPYTGPGNNPVFPVKKANGTWRFIHDLRATNSLTIDLSSSSPGPPDLSSLPTTLAHLQTIDLRDAFFQIPLPKQFQPYFAFTVPQQCNYGPGTRYAWKVLPQGFKNSPTLFEMQLAHILQPIRQAFPQCTILQYMDDILLASPSHEDLLLLSEATMASLISHGLPVSENKTQQTPGTIKFLGQIISPNHLTYDAVPTVPIRSRWALPELQALLGEIQWVSKGTPTLRQPLHSLYCALQRHTDPRDQIYLNPSQVQSLVQLRQALSQNCRSRLVQTLPLLGAIMLTLTGTTTVVFQSKEQWPLVWLHAPLPHTSQCPWGQLLASAVLLLDKYTLQSYGLLCQTIHHNISTQTFNQFIQTSDHPSVPILLHHSHRFKNLGAQTGELWNTFLKTAAPLAPVKALMPVFTLSPVIINTAPCLFSDGSTSRAAYILWDKQILSQRSFPLPPPHKSAQRAELLGLLHGLSSARSWRCLNIFLDSKYLYHYLRTLALGTFQGRSSQAPFQALLPRLLSRKVVYLHHVRSHTNLPDPISRLNALTDALLITPVLQLS

SEQ ID NO: 3754 - protein, 2025 aa, synthetic construct
MKRTADGSEFESPKKKRKVDKKYSIGLDIGTNSVGWAVITDEYKVPSKKFKVLGNTDRHSIKKNLIGALLFDSGETAEATRLKRTARRRYTRRKNRICYLQEIFSNEMAKVDDSFFHRLEESFLVEEDKKHERHPIFGNIVDEVAYHEKYPTIYHLRKKLVDSTDKADLRLIYLALAHMIKFRGHFLIEGDLNPDNSDVDKLFIQLVQTYNQLFEENPINASGVDAKAILSARLSKSRRLENLIAQLPGEKKNGLFGNLIALSLGLTPNFKSNFDLAEDAKLQLSKDTYDDDLDNLLAQIGDQYADLFLAAKNLSDAILLSDILRVNTEITKAPLSASMIKRYDEHHQDLTLLKALVRQQLPEKYKEIFFDQSKNGYAGYIDGGASQEEFYKFIKPILEKMDGTEELLVKLNREDLLRKQRTFDNGSIPHQIHLGELHAILRRQEDFYPFLKDNREKIEKILTFRIPYYVGPLARGNSRFAWMTRKSEETITPWNFEEVVDKGASAQSFIERMTNFDKNLPNEKVLPKHSLLYEYFTVYNELTKVKYVTEGMRKPAFLSGEQKKAIVDLLFKTNRKVTVKQLKEDYFKKIECFDSVEISGVEDRFNASLGTYHDLLKIIKDKDFLDNEENEDILEDIVLTLTLFEDREMIEERLKTYAHLFDDKVMKQLKRRRYTGWGRLSRKLINGIRDKQSGKTILDFLKSDGFANRNFMQLIHDDSLTFKEDIQKAQVSGQGDSLHEHIANLAGSPAIKKGILQTVKVVDELVKVMGRHKPENIVIEMARENQTTQKGQKNSRERMKRIEEGIKELGSQILKEHPVENTQLQNEKLYLYYLQNGRDMYVDQELDINRLSDYDVDHIVPQSFLKDDSIDNKVLTRSDKARGKSDNVPSEEVVKKMKNYWRQLLNAKLITQRKFDNLTKAERGGLSELDKAGFIKRQLVETRQITKHVAQILDSRMNTKYDENDKLIREVKVITLKSKLVSDFRKDFQFYKVREINNYHHAHDAYLNAVVGTALIKKYPKLESEFVYGDYKVYDVRKMIAKSEQEIGKATAKYFFYSNIMNFFKTEITLANGEIRKRPLIETNGETGEIVWDKGRDFATVRKVLSMPQVNIVKKTEVQTGGFSKESILPKRNSDKLIARKKDWDPKKYGGFDSPTVAYSVLVVAKVEKGKSKKLKSVKELLGITIMERSSFEKNPIDFLEAKGYKEVKKDLIIKLPKYSLFELENGRKRMLASAGELQKGNELALPSKYVNFLYLASHYEKLKGSPEDNEQKQLFVEQHKHYLDEIIEQISEFSKRVILADANLDKVLSAYNKHRDKPIREQAENIIHLFTLTNLGAPAAFKYFDTTIDRKRYTSTKEVLDATLIHQSITGLYETRIDLSQLGGDSGGSSGGSSGSETPGTSESATPESSGGSSGGSSMEHLPRPPQISQFPLNPERLQALQHLVRKALEAGHIEPYTGPGNNPVFPVKKANGTWRFIHDLRATNSLTIDLSSSSPGPPDLSSLPTTLAHLQTIDLRDAFFQIPLPKQFQPYFAFTVPQQCNYGPGTRYAWKVLPQGFKNSPTLFEMQLAHILQPIRQAFPQCTILQYMDDILLASPSHEDLLLLSEATMASLISHGLPVSENKTQQTPGTIKFLGQIISPNHLTYDAVPTVPIRSRWALPELQALLGEIQWVSKGTPTLRQPLHSLYCALQRHTDPRDQIYLNPSQVQSLVQLRQALSQNCRSRLVQTLPLLGAIMLTLTGTTTVVFQSKEQWPLVWLHAPLPHTSQCPWGQLLASAVLLLDKYTLQSYGLLCQTIHHNISTQTFNQFIQTSDHPSVPILLHHSHRFKNLGAQTGELWNTFLKTAAPLAPVKALMPVFTLSPVIINTAPCLFSDGSTSRAAYILWDKQILSQRSFPLPPPHKSAQRAELLGLLHGLSSARSWRCLNIFLDSKYLYHYLRTLALGTFQGRSSQAPFQALLPRLLSRKVVYLHHVRSHTNLPDPISRLNALTDALLITPVLQLSSGGSKRTADGSEFEPKKKRKV

SEQ ID NO: 3755 - protein, 2030 aa, synthetic construct
MPAAKRVKLDGGDKKYSIGLDIGTNSVGWAVITDEYKVPSKKFKVLGNTDRHSIKKNLIGALLFDSGETAEATRLKRTARRRYTRRKNRICYLQEIFSNEMAKVDDSFFHRLEESFLVEEDKKHERHPIFGNIVDEVAYHEKYPTIYHLRKKLVDSTDKADLRLIYLALAHMIKFRGHFLIEGDLNPDNSDVDKLFIQLVQTYNQLFEENPINASGVDAKAILSARLSKSRRLENLIAQLPGEKKNGLFGNLIALSLGLTPNFKSNFDLAEDAKLQLSKDTYDDDLDNLLAQIGDQYADLFLAAKNLSDAILLSDILRVNTEITKAPLSASMIKRYDEHHQDLTLLKALVRQQLPEKYKEIFFDQSKNGYAGYIDGGASQEEFYKFIKPILEKMDGTEELLVKLNREDLLRKQRTFDNGSIPHQIHLGELHAILRRQEDFYPFLKDNREKIEKILTFRIPYYVGPLARGNSRFAWMTRKSEETITPWNFEEVVDKGASAQSFIERMTNFDKNLPNEKVLPKHSLLYEYFTVYNELTKVKYVTEGMRKPAFLSGEQKKAIVDLLFKTNRKVTVKQLKEDYFKKIECFDSVEISGVEDRFNASLGTYHDLLKIIKDKDFLDNEENEDILEDIVLTLTLFEDREMIEERLKTYAHLFDDKVMKQLKRRRYTGWGRLSRKLINGIRDKQSGKTILDFLKSDGFANRNFMQLIHDDSLTFKEDIQKAQVSGQGDSLHEHIANLAGSPAIKKGILQTVKVVDELVKVMGRHKPENIVIEMARENQTTQKGQKNSRERMKRIEEGIKELGSQILKEHPVENTQLQNEKLYLYYLQNGRDMYVDQELDINRLSDYDVDHIVPQSFLKDDSIDNKVLTRSDKARGKSDNVPSEEVVKKMKNYWRQLLNAKLITQRKFDNLTKAERGGLSELDKAGFIKRQLVETRQITKHVAQILDSRMNTKYDENDKLIREVKVITLKSKLVSDFRKDFQFYKVREINNYHHAHDAYLNAVVGTALIKKYPKLESEFVYGDYKVYDVRKMIAKSEQEIGKATAKYFFYSNIMNFFKTEITLANGEIRKRPLIETNGETGEIVWDKGRDFATVRKVLSMPQVNIVKKTEVQTGGFSKESILPKRNSDKLIARKKDWDPKKYGGFDSPTVAYSVLVVAKVEKGKSKKLKSVKELLGITIMERSSFEKNPIDFLEAKGYKEVKKDLIIKLPKYSLFELENGRKRMLASAGELQKGNELALPSKYVNFLYLASHYEKLKGSPEDNEQKQLFVEQHKHYLDEIIEQISEFSKRVILADANLDKVLSAYNKHRDKPIREQAENIIHLFTLTNLGAPAAFKYFDTTIDRKRYTSTKEVLDATLIHQSITGLYETRIDLSQLGGDSGGSSGGSSGSETPGTSESATPESSGGSSGGSSMEHLPRPPQISQFPLNPERLQALQHLVRKALEAGHIEPYTGPGNNPVFPVKKANGTWRFIHDLRATNSLTIDLSSSSPGPPDLSSLPTTLAHLQTIDLRDAFFQIPLPKQFQPYFAFTVPQQCNYGPGTRYAWKVLPQGFKNSPTLFEMQLAHILQPIRQAFPQCTILQYMDDILLASPSHEDLLLLSEATMASLISHGLPVSENKTQQTPGTIKFLGQIISPNHLTYDAVPTVPIRSRWALPELQALLGEIQWVSKGTPTLRQPLHSLYCALQRHTDPRDQIYLNPSQVQSLVQLRQALSQNCRSRLVQTLPLLGAIMLTLTGTTTVVFQSKEQWPLVWLHAPLPHTSQCPWGQLLASAVLLLDKYTLQSYGLLCQTIHHNISTQTFNQFIQTSDHPSVPILLHHSHRFKNLGAQTGELWNTFLKTAAPLAPVKALMPVFTLSPVIINTAPCLFSDGSTSRAAYILWDKQILSQRSFPLPPPHKSAQRAELLGLLHGLSSARSWRCLNIFLDSKYLYHYLRTLALGTFQGRSSQAPFQALLPRLLSRKVVYLHHVRSHTNLPDPISRLNALTDALLITPVLQLSSGGSKRTADGSEFEKRTADGSEFESPKKKAKVE

SEQ ID NO: 3756 - protein, 2055 aa, synthetic construct
MPAAKRVKLDGGDKKYSIGLDIGTNSVGWAVITDEYKVPSKKFKVLGNTDRHSIKKNLIGALLFDSGETAEATRLKRTARRRYTRRKNRICYLQEIFSNEMAKVDDSFFHRLEESFLVEEDKKHERHPIFGNIVDEVAYHEKYPTIYHLRKKLVDSTDKADLRLIYLALAHMIKFRGHFLIEGDLNPDNSDVDKLFIQLVQTYNQLFEENPINASGVDAKAILSARLSKSRRLENLIAQLPGEKKNGLFGNLIALSLGLTPNFKSNFDLAEDAKLQLSKDTYDDDLDNLLAQIGDQYADLFLAAKNLSDAILLSDILRVNTEITKAPLSASMIKRYDEHHQDLTLLKALVRQQLPEKYKEIFFDQSKNGYAGYIDGGASQEEFYKFIKPILEKMDGTEELLVKLNREDLLRKQRTFDNGSIPHQIHLGELHAILRRQEDFYPFLKDNREKIEKILTFRIPYYVGPLARGNSRFAWMTRKSEETITPWNFEEVVDKGASAQSFIERMTNFDKNLPNEKVLPKHSLLYEYFTVYNELTKVKYVTEGMRKPAFLSGEQKKAIVDLLFKTNRKVTVKQLKEDYFKKIECFDSVEISGVEDRFNASLGTYHDLLKIIKDKDFLDNEENEDILEDIVLTLTLFEDREMIEERLKTYAHLFDDKVMKQLKRRRYTGWGRLSRKLINGIRDKQSGKTILDFLKSDGFANRNFMQLIHDDSLTFKEDIQKAQVSGQGDSLHEHIANLAGSPAIKKGILQTVKVVDELVKVMGRHKPENIVIEMARENQTTQKGQKNSRERMKRIEEGIKELGSQILKEHPVENTQLQNEKLYLYYLQNGRDMYVDQELDINRLSDYDVDHIVPQSFLKDDSIDNKVLTRSDKARGKSDNVPSEEVVKKMKNYWRQLLNAKLITQRKFDNLTKAERGGLSELDKAGFIKRQLVETRQITKHVAQILDSRMNTKYDENDKLIREVKVITLKSKLVSDFRKDFQFYKVREINNYHHAHDAYLNAVVGTALIKKYPKLESEFVYGDYKVYDVRKMIAKSEQEIGKATAKYFFYSNIMNFFKTEITLANGEIRKRPLIETNGETGEIVWDKGRDFATVRKVLSMPQVNIVKKTEVQTGGFSKESILPKRNSDKLIARKKDWDPKKYGGFDSPTVAYSVLVVAKVEKGKSKKLKSVKELLGITIMERSSFEKNPIDFLEAKGYKEVKKDLIIKLPKYSLFELENGRKRMLASAGELQKGNELALPSKYVNFLYLASHYEKLKGSPEDNEQKQLFVEQHKHYLDEIIEQISEFSKRVILADANLDKVLSAYNKHRDKPIREQAENIIHLFTLTNLGAPAAFKYFDTTIDRKRYTSTKEVLDATLIHQSITGLYETRIDLSQLGGDGGSGGSSGGSSGSETPGTSESATPESSGGSSGGSSGGAVLGLEHLPRPPQISQFPLNPERLQALQHLVRKALEAGHIEPYTGPGNNPVFPVKKANGTWRFIHDLRATNSLTIDLSSSSPGPPDLSSLPTTLAHLQTIDLRDAFFQIPLPKQFQPYFAFTVPQQCNYGPGTRYAWKVLPQGFKNSPTLFEMQLAHILQPIRQAFPQCTILQYMDDILLASPSHEDLLLLSEATMASLISHGLPVSENKTQQTPGTIKFLGQIISPNHLTYDAVPTVPIRSRWALPELQALLGEIQWVSKGTPTLRQPLHSLYCALQRHTDPRDQIYLNPSQVQSLVQLRQALSQNCRSRLVQTLPLLGAIMLTLTGTTTVVFQSKEQWPLVWLHAPLPHTSQCPWGQLLASAVLLLDKYTLQSYGLLCQTIHHNISTQTFNQFIQTSDHPSVPILLHHSHRFKNLGAQTGELWNTFLKTAAPLAPVKALMPVFTLSPVIINTAPCLFSDGSTSRAAYILWDKQILSQRSFPLPPPHKSAQRAELLGLLHGLSSARSWRCLNIFLDSKYLYHYLRTLALGTFQGRSSQAPFQALLPRLLSRKVVYLHHVRSHTNLPDPISRLNALTDALLITPVLQLAGKRTADGSEFEKRTADGSEFESPKKKAKVEGSGEGRGSLLTCGDVEENPG

SEQ ID NO: 3757 - protein, 2026 aa, synthetic construct
MPAAKRVKLDGGDKKYSIGLDIGTNSVGWAVITDEYKVPSKKFKVLGNTDRHSIKKNLIGALLFDSGETAEATRLKRTARRRYTRRKNRICYLQEIFSNEMAKVDDSFFHRLEESFLVEEDKKHERHPIFGNIVDEVAYHEKYPTIYHLRKKLVDSTDKADLRLIYLALAHMIKFRGHFLIEGDLNPDNSDVDKLFIQLVQTYNQLFEENPINASGVDAKAILSARLSKSRRLENLIAQLPGEKKNGLFGNLIALSLGLTPNFKSNFDLAEDAKLQLSKDTYDDDLDNLLAQIGDQYADLFLAAKNLSDAILLSDILRVNTEITKAPLSASMIKRYDEHHQDLTLLKALVRQQLPEKYKEIFFDQSKNGYAGYIDGGASQEEFYKFIKPILEKMDGTEELLVKLNREDLLRKQRTFDNGSIPHQIHLGELHAILRRQEDFYPFLKDNREKIEKILTFRIPYYVGPLARGNSRFAWMTRKSEETITPWNFEEVVDKGASAQSFIERMTNFDKNLPNEKVLPKHSLLYEYFTVYNELTKVKYVTEGMRKPAFLSGEQKKAIVDLLFKTNRKVTVKQLKEDYFKKIECFDSVEISGVEDRFNASLGTYHDLLKIIKDKDFLDNEENEDILEDIVLTLTLFEDREMIEERLKTYAHLFDDKVMKQLKRRRYTGWGRLSRKLINGIRDKQSGKTILDFLKSDGFANRNFMQLIHDDSLTFKEDIQKAQVSGQGDSLHEHIANLAGSPAIKKGILQTVKVVDELVKVMGRHKPENIVIEMARENQTTQKGQKNSRERMKRIEEGIKELGSQILKEHPVENTQLQNEKLYLYYLQNGRDMYVDQELDINRLSDYDVDHIVPQSFLKDDSIDNKVLTRSDKARGKSDNVPSEEVVKKMKNYWRQLLNAKLITQRKFDNLTKAERGGLSELDKAGFIKRQLVETRQITKHVAQILDSRMNTKYDENDKLIREVKVITLKSKLVSDFRKDFQFYKVREINNYHHAHDAYLNAVVGTALIKKYPKLESEFVYGDYKVYDVRKMIAKSEQEIGKATAKYFFYSNIMNFFKTEITLANGEIRKRPLIETNGETGEIVWDKGRDFATVRKVLSMPQVNIVKKTEVQTGGFSKESILPKRNSDKLIARKKDWDPKKYGGFDSPTVAYSVLVVAKVEKGKSKKLKSVKELLGITIMERSSFEKNPIDFLEAKGYKEVKKDLIIKLPKYSLFELENGRKRMLASAGELQKGNELALPSKYVNFLYLASHYEKLKGSPEDNEQKQLFVEQHKHYLDEIIEQISEFSKRVILADANLDKVLSAYNKHRDKPIREQAENIIHLFTLTNLGAPAAFKYFDTTIDRKRYTSTKEVLDATLIHQSITGLYETRIDLSQLGGDGGGGGGGGAVLGLEHLPRPPQISQFPLNPERLQALQHLVRKALEAGHIEPYTGPGNNPVFPVKKANGTWRFIHDLRATNSLTIDLSSSSPGPPDLSSLPTTLAHLQTIDLRDAFFQIPLPKQFQPYFAFTVPQQCNYGPGTRYAWKVLPQGFKNSPTLFEMQLAHILQPIRQAFPQCTILQYMDDILLASPSHEDLLLLSEATMASLISHGLPVSENKTQQTPGTIKFLGQIISPNHLTYDAVPTVPIRSRWALPELQALLGEIQWVSKGTPTLRQPLHSLYCALQRHTDPRDQIYLNPSQVQSLVQLRQALSQNCRSRLVQTLPLLGAIMLTLTGTTTVVFQSKEQWPLVWLHAPLPHTSQCPWGQLLASAVLLLDKYTLQSYGLLCQTIHHNISTQTFNQFIQTSDHPSVPILLHHSHRFKNLGAQTGELWNTFLKTAAPLAPVKALMPVFTLSPVIINTAPCLFSDGSTSRAAYILWDKQILSQRSFPLPPPHKSAQRAELLGLLHGLSSARSWRCLNIFLDSKYLYHYLRTLALGTFQGRSSQAPFQALLPRLLSRKVVYLHHVRSHTNLPDPISRLNALTDALLITPVLQLAGKRTADGSEFEKRTADGSEFESPKKKAKVEGSGEGRGSLLTCGDVEENPG

SEQ ID NO: 3758 - protein, 2028 aa, synthetic construct
MPAAKRVKLDGGDKKYSIGLDIGTNSVGWAVITDEYKVPSKKFKVLGNTDRHSIKKNLIGALLFDSGETAEATRLKRTARRRYTRRKNRICYLQEIFSNEMAKVDDSFFHRLEESFLVEEDKKHERHPIFGNIVDEVAYHEKYPTIYHLRKKLVDSTDKADLRLIYLALAHMIKFRGHFLIEGDLNPDNSDVDKLFIQLVQTYNQLFEENPINASGVDAKAILSARLSKSRRLENLIAQLPGEKKNGLFGNLIALSLGLTPNFKSNFDLAEDAKLQLSKDTYDDDLDNLLAQIGDQYADLFLAAKNLSDAILLSDILRVNTEITKAPLSASMIKRYDEHHQDLTLLKALVRQQLPEKYKEIFFDQSKNGYAGYIDGGASQEEFYKFIKPILEKMDGTEELLVKLNREDLLRKQRTFDNGSIPHQIHLGELHAILRRQEDFYPFLKDNREKIEKILTFRIPYYVGPLARGNSRFAWMTRKSEETITPWNFEEVVDKGASAQSFIERMTNFDKNLPNEKVLPKHSLLYEYFTVYNELTKVKYVTEGMRKPAFLSGEQKKAIVDLLFKTNRKVTVKQLKEDYFKKIECFDSVEISGVEDRFNASLGTYHDLLKIIKDKDFLDNEENEDILEDIVLTLTLFEDREMIEERLKTYAHLFDDKVMKQLKRRRYTGWGRLSRKLINGIRDKQSGKTILDFLKSDGFANRNFMQLIHDDSLTFKEDIQKAQVSGQGDSLHEHIANLAGSPAIKKGILQTVKVVDELVKVMGRHKPENIVIEMARENQTTQKGQKNSRERMKRIEEGIKELGSQILKEHPVENTQLQNEKLYLYYLQNGRDMYVDQELDINRLSDYDVDHIVPQSFLKDDSIDNKVLTRSDKARGKSDNVPSEEVVKKMKNYWRQLLNAKLITQRKFDNLTKAERGGLSELDKAGFIKRQLVETRQITKHVAQILDSRMNTKYDENDKLIREVKVITLKSKLVSDFRKDFQFYKVREINNYHHAHDAYLNAVVGTALIKKYPKLESEFVYGDYKVYDVRKMIAKSEQEIGKATAKYFFYSNIMNFFKTEITLANGEIRKRPLIETNGETGEIVWDKGRDFATVRKVLSMPQVNIVKKTEVQTGGFSKESILPKRNSDKLIARKKDWDPKKYGGFDSPTVAYSVLVVAKVEKGKSKKLKSVKELLGITIMERSSFEKNPIDFLEAKGYKEVKKDLIIKLPKYSLFELENGRKRMLASAGELQKGNELALPSKYVNFLYLASHYEKLKGSPEDNEQKQLFVEQHKHYLDEIIEQISEFSKRVILADANLDKVLSAYNKHRDKPIREQAENIIHLFTLTNLGAPAAFKYFDTTIDRKRYTSTKEVLDATLIHQSITGLYETRIDLSQLGGDGGGGGGGGGGAVLGLEHLPRPPQISQFPLNPERLQALQHLVRKALEAGHIEPYTGPGNNPVFPVKKANGTWRFIHDLRATNSLTIDLSSSSPGPPDLSSLPTTLAHLQTIDLRDAFFQIPLPKQFQPYFAFTVPQQCNYGPGTRYAWKVLPQGFKNSPTLFEMQLAHILQPIRQAFPQCTILQYMDDILLASPSHEDLLLLSEATMASLISHGLPVSENKTQQTPGTIKFLGQIISPNHLTYDAVPTVPIRSRWALPELQALLGEIQWVSKGTPTLRQPLHSLYCALQRHTDPRDQIYLNPSQVQSLVQLRQALSQNCRSRLVQTLPLLGAIMLTLTGTTTVVFQSKEQWPLVWLHAPLPHTSQCPWGQLLASAVLLLDKYTLQSYGLLCQTIHHNISTQTFNQFIQTSDHPSVPILLHHSHRFKNLGAQTGELWNTFLKTAAPLAPVKALMPVFTLSPVIINTAPCLFSDGSTSRAAYILWDKQILSQRSFPLPPPHKSAQRAELLGLLHGLSSARSWRCLNIFLDSKYLYHYLRTLALGTFQGRSSQAPFQALLPRLLSRKVVYLHHVRSHTNLPDPISRLNALTDALLITPVLQLAGKRTADGSEFEKRTADGSEFESPKKKAKVEGSGEGRGSLLTCGDVEENPG

SEQ ID NO: 3759 - protein, 2028 aa, synthetic construct
MPAAKRVKLDGGDKKYSIGLDIGTNSVGWAVITDEYKVPSKKFKVLGNTDRHSIKKNLIGALLFDSGETAEATRLKRTARRRYTRRKNRICYLQEIFSNEMAKVDDSFFHRLEESFLVEEDKKHERHPIFGNIVDEVAYHEKYPTIYHLRKKLVDSTDKADLRLIYLALAHMIKFRGHFLIEGDLNPDNSDVDKLFIQLVQTYNQLFEENPINASGVDAKAILSARLSKSRRLENLIAQLPGEKKNGLFGNLIALSLGLTPNFKSNFDLAEDAKLQLSKDTYDDDLDNLLAQIGDQYADLFLAAKNLSDAILLSDILRVNTEITKAPLSASMIKRYDEHHQDLTLLKALVRQQLPEKYKEIFFDQSKNGYAGYIDGGASQEEFYKFIKPILEKMDGTEELLVKLNREDLLRKQRTFDNGSIPHQIHLGELHAILRRQEDFYPFLKDNREKIEKILTFRIPYYVGPLARGNSRFAWMTRKSEETITPWNFEEVVDKGASAQSFIERMTNFDKNLPNEKVLPKHSLLYEYFTVYNELTKVKYVTEGMRKPAFLSGEQKKAIVDLLFKTNRKVTVKQLKEDYFKKIECFDSVEISGVEDRFNASLGTYHDLLKIIKDKDFLDNEENEDILEDIVLTLTLFEDREMIEERLKTYAHLFDDKVMKQLKRRRYTGWGRLSRKLINGIRDKQSGKTILDFLKSDGFANRNFMQLIHDDSLTFKEDIQKAQVSGQGDSLHEHIANLAGSPAIKKGILQTVKVVDELVKVMGRHKPENIVIEMARENQTTQKGQKNSRERMKRIEEGIKELGSQILKEHPVENTQLQNEKLYLYYLQNGRDMYVDQELDINRLSDYDVDHIVPQSFLKDDSIDNKVLTRSDKARGKSDNVPSEEVVKKMKNYWRQLLNAKLITQRKFDNLTKAERGGLSELDKAGFIKRQLVETRQITKHVAQILDSRMNTKYDENDKLIREVKVITLKSKLVSDFRKDFQFYKVREINNYHHAHDAYLNAVVGTALIKKYPKLESEFVYGDYKVYDVRKMIAKSEQEIGKATAKYFFYSNIMNFFKTEITLANGEIRKRPLIETNGETGEIVWDKGRDFATVRKVLSMPQVNIVKKTEVQTGGFSKESILPKRNSDKLIARKKDWDPKKYGGFDSPTVAYSVLVVAKVEKGKSKKLKSVKELLGITIMERSSFEKNPIDFLEAKGYKEVKKDLIIKLPKYSLFELENGRKRMLASAGELQKGNELALPSKYVNFLYLASHYEKLKGSPEDNEQKQLFVEQHKHYLDEIIEQISEFSKRVILADANLDKVLSAYNKHRDKPIREQAENIIHLFTLTNLGAPAAFKYFDTTIDRKRYTSTKEVLDATLIHQSITGLYETRIDLSQLGGDGGGSSGGGGGAVLGLEHLPRPPQISQFPLNPERLQALQHLVRKALEAGHIEPYTGPGNNPVFPVKKANGTWRFIHDLRATNSLTIDLSSSSPGPPDLSSLPTTLAHLQTIDLRDAFFQIPLPKQFQPYFAFTVPQQCNYGPGTRYAWKVLPQGFKNSPTLFEMQLAHILQPIRQAFPQCTILQYMDDILLASPSHEDLLLLSEATMASLISHGLPVSENKTQQTPGTIKFLGQIISPNHLTYDAVPTVPIRSRWALPELQALLGEIQWVSKGTPTLRQPLHSLYCALQRHTDPRDQIYLNPSQVQSLVQLRQALSQNCRSRLVQTLPLLGAIMLTLTGTTTVVFQSKEQWPLVWLHAPLPHTSQCPWGQLLASAVLLLDKYTLQSYGLLCQTIHHNISTQTFNQFIQTSDHPSVPILLHHSHRFKNLGAQTGELWNTFLKTAAPLAPVKALMPVFTLSPVIINTAPCLFSDGSTSRAAYILWDKQILSQRSFPLPPPHKSAQRAELLGLLHGLSSARSWRCLNIFLDSKYLYHYLRTLALGTFQGRSSQAPFQALLPRLLSRKVVYLHHVRSHTNLPDPISRLNALTDALLITPVLQLAGKRTADGSEFEKRTADGSEFESPKKKAKVEGSGEGRGSLLTCGDVEENPG

SEQ ID NO: 3760 - protein, 2033 aa, synthetic construct
MPAAKRVKLDGGDKKYSIGLDIGTNSVGWAVITDEYKVPSKKFKVLGNTDRHSIKKNLIGALLFDSGETAEATRLKRTARRRYTRRKNRICYLQEIFSNEMAKVDDSFFHRLEESFLVEEDKKHERHPIFGNIVDEVAYHEKYPTIYHLRKKLVDSTDKADLRLIYLALAHMIKFRGHFLIEGDLNPDNSDVDKLFIQLVQTYNQLFEENPINASGVDAKAILSARLSKSRRLENLIAQLPGEKKNGLFGNLIALSLGLTPNFKSNFDLAEDAKLQLSKDTYDDDLDNLLAQIGDQYADLFLAAKNLSDAILLSDILRVNTEITKAPLSASMIKRYDEHHQDLTLLKALVRQQLPEKYKEIFFDQSKNGYAGYIDGGASQEEFYKFIKPILEKMDGTEELLVKLNREDLLRKQRTFDNGSIPHQIHLGELHAILRRQEDFYPFLKDNREKIEKILTFRIPYYVGPLARGNSRFAWMTRKSEETITPWNFEEVVDKGASAQSFIERMTNFDKNLPNEKVLPKHSLLYEYFTVYNELTKVKYVTEGMRKPAFLSGEQKKAIVDLLFKTNRKVTVKQLKEDYFKKIECFDSVEISGVEDRFNASLGTYHDLLKIIKDKDFLDNEENEDILEDIVLTLTLFEDREMIEERLKTYAHLFDDKVMKQLKRRRYTGWGRLSRKLINGIRDKQSGKTILDFLKSDGFANRNFMQLIHDDSLTFKEDIQKAQVSGQGDSLHEHIANLAGSPAIKKGILQTVKVVDELVKVMGRHKPENIVIEMARENQTTQKGQKNSRERMKRIEEGIKELGSQILKEHPVENTQLQNEKLYLYYLQNGRDMYVDQELDINRLSDYDVDHIVPQSFLKDDSIDNKVLTRSDKARGKSDNVPSEEVVKKMKNYWRQLLNAKLITQRKFDNLTKAERGGLSELDKAGFIKRQLVETRQITKHVAQILDSRMNTKYDENDKLIREVKVITLKSKLVSDFRKDFQFYKVREINNYHHAHDAYLNAVVGTALIKKYPKLESEFVYGDYKVYDVRKMIAKSEQEIGKATAKYFFYSNIMNFFKTEITLANGEIRKRPLIETNGETGEIVWDKGRDFATVRKVLSMPQVNIVKKTEVQTGGFSKESILPKRNSDKLIARKKDWDPKKYGGFDSPTVAYSVLVVAKVEKGKSKKLKSVKELLGITIMERSSFEKNPIDFLEAKGYKEVKKDLIIKLPKYSLFELENGRKRMLASAGELQKGNELALPSKYVNFLYLASHYEKLKGSPEDNEQKQLFVEQHKHYLDEIIEQISEFSKRVILADANLDKVLSAYNKHRDKPIREQAENIIHLFTLTNLGAPAAFKYFDTTIDRKRYTSTKEVLDATLIHQSITGLYETRIDLSQLGGDGGEAAAKGGSGGGGGAVLGLEHLPRPPQISQFPLNPERLQALQHLVRKALEAGHIEPYTGPGNNPVFPVKKANGTWRFIHDLRATNSLTIDLSSSSPGPPDLSSLPTTLAHLQTIDLRDAFFQIPLPKQFQPYFAFTVPQQCNYGPGTRYAWKVLPQGFKNSPTLFEMQLAHILQPIRQAFPQCTILQYMDDILLASPSHEDLLLLSEATMASLISHGLPVSENKTQQTPGTIKFLGQIISPNHLTYDAVPTVPIRSRWALPELQALLGEIQWVSKGTPTLRQPLHSLYCALQRHTDPRDQIYLNPSQVQSLVQLRQALSQNCRSRLVQTLPLLGAIMLTLTGTTTVVFQSKEQWPLVWLHAPLPHTSQCPWGQLLASAVLLLDKYTLQSYGLLCQTIHHNISTQTFNQFIQTSDHPSVPILLHHSHRFKNLGAQTGELWNTFLKTAAPLAPVKALMPVFTLSPVIINTAPCLFSDGSTSRAAYILWDKQILSQRSFPLPPPHKSAQRAELLGLLHGLSSARSWRCLNIFLDSKYLYHYLRTLALGTFQGRSSQAPFQALLPRLLSRKVVYLHHVRSHTNLPDPISRLNALTDALLITPVLQLAGKRTADGSEFEKRTADGSEFESPKKKAKVEGSGEGRGSLLTCGDVEENPG

SEQ ID NO: 3761 - protein, 2033 aa, synthetic construct
MPAAKRVKLDGGDKKYSIGLDIGTNSVGWAVITDEYKVPSKKFKVLGNTDRHSIKKNLIGALLFDSGETAEATRLKRTARRRYTRRKNRICYLQEIFSNEMAKVDDSFFHRLEESFLVEEDKKHERHPIFGNIVDEVAYHEKYPTIYHLRKKLVDSTDKADLRLIYLALAHMIKFRGHFLIEGDLNPDNSDVDKLFIQLVQTYNQLFEENPINASGVDAKAILSARLSKSRRLENLIAQLPGEKKNGLFGNLIALSLGLTPNFKSNFDLAEDAKLQLSKDTYDDDLDNLLAQIGDQYADLFLAAKNLSDAILLSDILRVNTEITKAPLSASMIKRYDEHHQDLTLLKALVRQQLPEKYKEIFFDQSKNGYAGYIDGGASQEEFYKFIKPILEKMDGTEELLVKLNREDLLRKQRTFDNGSIPHQIHLGELHAILRRQEDFYPFLKDNREKIEKILTFRIPYYVGPLARGNSRFAWMTRKSEETITPWNFEEVVDKGASAQSFIERMTNFDKNLPNEKVLPKHSLLYEYFTVYNELTKVKYVTEGMRKPAFLSGEQKKAIVDLLFKTNRKVTVKQLKEDYFKKIECFDSVEISGVEDRFNASLGTYHDLLKIIKDKDFLDNEENEDILEDIVLTLTLFEDREMIEERLKTYAHLFDDKVMKQLKRRRYTGWGRLSRKLINGIRDKQSGKTILDFLKSDGFANRNFMQLIHDDSLTFKEDIQKAQVSGQGDSLHEHIANLAGSPAIKKGILQTVKVVDELVKVMGRHKPENIVIEMARENQTTQKGQKNSRERMKRIEEGIKELGSQILKEHPVENTQLQNEKLYLYYLQNGRDMYVDQELDINRLSDYDVDHIVPQSFLKDDSIDNKVLTRSDKARGKSDNVPSEEVVKKMKNYWRQLLNAKLITQRKFDNLTKAERGGLSELDKAGFIKRQLVETRQITKHVAQILDSRMNTKYDENDKLIREVKVITLKSKLVSDFRKDFQFYKVREINNYHHAHDAYLNAVVGTALIKKYPKLESEFVYGDYKVYDVRKMIAKSEQEIGKATAKYFFYSNIMNFFKTEITLANGEIRKRPLIETNGETGEIVWDKGRDFATVRKVLSMPQVNIVKKTEVQTGGFSKESILPKRNSDKLIARKKDWDPKKYGGFDSPTVAYSVLVVAKVEKGKSKKLKSVKELLGITIMERSSFEKNPIDFLEAKGYKEVKKDLIIKLPKYSLFELENGRKRMLASAGELQKGNELALPSKYVNFLYLASHYEKLKGSPEDNEQKQLFVEQHKHYLDEIIEQISEFSKRVILADANLDKVLSAYNKHRDKPIREQAENIIHLFTLTNLGAPAAFKYFDTTIDRKRYTSTKEVLDATLIHQSITGLYETRIDLSQLGGDGGGGSPAPEAAAKGGAVLGLEHLPRPPQISQFPLNPERLQALQHLVRKALEAGHIEPYTGPGNNPVFPVKKANGTWRFIHDLRATNSLTIDLSSSSPGPPDLSSLPTTLAHLQTIDLRDAFFQIPLPKQFQPYFAFTVPQQCNYGPGTRYAWKVLPQGFKNSPTLFEMQLAHILQPIRQAFPQCTILQYMDDILLASPSHEDLLLLSEATMASLISHGLPVSENKTQQTPGTIKFLGQIISPNHLTYDAVPTVPIRSRWALPELQALLGEIQWVSKGTPTLRQPLHSLYCALQRHTDPRDQIYLNPSQVQSLVQLRQALSQNCRSRLVQTLPLLGAIMLTLTGTTTVVFQSKEQWPLVWLHAPLPHTSQCPWGQLLASAVLLLDKYTLQSYGLLCQTIHHNISTQTFNQFIQTSDHPSVPILLHHSHRFKNLGAQTGELWNTFLKTAAPLAPVKALMPVFTLSPVIINTAPCLFSDGSTSRAAYILWDKQILSQRSFPLPPPHKSAQRAELLGLLHGLSSARSWRCLNIFLDSKYLYHYLRTLALGTFQGRSSQAPFQALLPRLLSRKVVYLHHVRSHTNLPDPISRLNALTDALLITPVLQLAGKRTADGSEFEKRTADGSEFESPKKKAKVEGSGEGRGSLLTCGDVEENPG

SEQ ID NO: 3762 - protein, 2033 aa, synthetic construct
MPAAKRVKLDGGDKKYSIGLDIGTNSVGWAVITDEYKVPSKKFKVLGNTDRHSIKKNLIGALLFDSGETAEATRLKRTARRRYTRRKNRICYLQEIFSNEMAKVDDSFFHRLEESFLVEEDKKHERHPIFGNIVDEVAYHEKYPTIYHLRKKLVDSTDKADLRLIYLALAHMIKFRGHFLIEGDLNPDNSDVDKLFIQLVQTYNQLFEENPINASGVDAKAILSARLSKSRRLENLIAQLPGEKKNGLFGNLIALSLGLTPNFKSNFDLAEDAKLQLSKDTYDDDLDNLLAQIGDQYADLFLAAKNLSDAILLSDILRVNTEITKAPLSASMIKRYDEHHQDLTLLKALVRQQLPEKYKEIFFDQSKNGYAGYIDGGASQEEFYKFIKPILEKMDGTEELLVKLNREDLLRKQRTFDNGSIPHQIHLGELHAILRRQEDFYPFLKDNREKIEKILTFRIPYYVGPLARGNSRFAWMTRKSEETITPWNFEEVVDKGASAQSFIERMTNFDKNLPNEKVLPKHSLLYEYFTVYNELTKVKYVTEGMRKPAFLSGEQKKAIVDLLFKTNRKVTVKQLKEDYFKKIECFDSVEISGVEDRFNASLGTYHDLLKIIKDKDFLDNEENEDILEDIVLTLTLFEDREMIEERLKTYAHLFDDKVMKQLKRRRYTGWGRLSRKLINGIRDKQSGKTILDFLKSDGFANRNFMQLIHDDSLTFKEDIQKAQVSGQGDSLHEHIANLAGSPAIKKGILQTVKVVDELVKVMGRHKPENIVIEMARENQTTQKGQKNSRERMKRIEEGIKELGSQILKEHPVENTQLQNEKLYLYYLQNGRDMYVDQELDINRLSDYDVDHIVPQSFLKDDSIDNKVLTRSDKARGKSDNVPSEEVVKKMKNYWRQLLNAKLITQRKFDNLTKAERGGLSELDKAGFIKRQLVETRQITKHVAQILDSRMNTKYDENDKLIREVKVITLKSKLVSDFRKDFQFYKVREINNYHHAHDAYLNAVVGTALIKKYPKLESEFVYGDYKVYDVRKMIAKSEQEIGKATAKYFFYSNIMNFFKTEITLANGEIRKRPLIETNGETGEIVWDKGRDFATVRKVLSMPQVNIVKKTEVQTGGFSKESILPKRNSDKLIARKKDWDPKKYGGFDSPTVAYSVLVVAKVEKGKSKKLKSVKELLGITIMERSSFEKNPIDFLEAKGYKEVKKDLIIKLPKYSLFELENGRKRMLASAGELQKGNELALPSKYVNFLYLASHYEKLKGSPEDNEQKQLFVEQHKHYLDEIIEQISEFSKRVILADANLDKVLSAYNKHRDKPIREQAENIIHLFTLTNLGAPAAFKYFDTTIDRKRYTSTKEVLDATLIHQSITGLYETRIDLSQLGGDGGGGGEAAAKGSSGGAVLGLEHLPRPPQISQFPLNPERLQALQHLVRKALEAGHIEPYTGPGNNPVFPVKKANGTWRFIHDLRATNSLTIDLSSSSPGPPDLSSLPTTLAHLQTIDLRDAFFQIPLPKQFQPYFAFTVPQQCNYGPGTRYAWKVLPQGFKNSPTLFEMQLAHILQPIRQAFPQCTILQYMDDILLASPSHEDLLLLSEATMASLISHGLPVSENKTQQTPGTIKFLGQIISPNHLTYDAVPTVPIRSRWALPELQALLGEIQWVSKGTPTLRQPLHSLYCALQRHTDPRDQIYLNPSQVQSLVQLRQALSQNCRSRLVQTLPLLGAIMLTLTGTTTVVFQSKEQWPLVWLHAPLPHTSQCPWGQLLASAVLLLDKYTLQSYGLLCQTIHHNISTQTFNQFIQTSDHPSVPILLHHSHRFKNLGAQTGELWNTFLKTAAPLAPVKALMPVFTLSPVIINTAPCLFSDGSTSRAAYILWDKQILSQRSFPLPPPHKSAQRAELLGLLHGLSSARSWRCLNIFLDSKYLYHYLRTLALGTFQGRSSQAPFQALLPRLLSRKVVYLHHVRSHTNLPDPISRLNALTDALLITPVLQLAGKRTADGSEFEKRTADGSEFESPKKKAKVEGSGEGRGSLLTCGDVEENPG

SEQ ID NO: 3763 - protein, 2068 aa, synthetic construct
MPAAKRVKLDGGDKKYSIGLDIGTNSVGWAVITDEYKVPSKKFKVLGNTDRHSIKKNLIGALLFDSGETAEATRLKRTARRRYTRRKNRICYLQEIFSNEMAKVDDSFFHRLEESFLVEEDKKHERHPIFGNIVDEVAYHEKYPTIYHLRKKLVDSTDKADLRLIYLALAHMIKFRGHFLIEGDLNPDNSDVDKLFIQLVQTYNQLFEENPINASGVDAKAILSARLSKSRRLENLIAQLPGEKKNGLFGNLIALSLGLTPNFKSNFDLAEDAKLQLSKDTYDDDLDNLLAQIGDQYADLFLAAKNLSDAILLSDILRVNTEITKAPLSASMIKRYDEHHQDLTLLKALVRQQLPEKYKEIFFDQSKNGYAGYIDGGASQEEFYKFIKPILEKMDGTEELLVKLNREDLLRKQRTFDNGSIPHQIHLGELHAILRRQEDFYPFLKDNREKIEKILTFRIPYYVGPLARGNSRFAWMTRKSEETITPWNFEEVVDKGASAQSFIERMTNFDKNLPNEKVLPKHSLLYEYFTVYNELTKVKYVTEGMRKPAFLSGEQKKAIVDLLFKTNRKVTVKQLKEDYFKKIECFDSVEISGVEDRFNASLGTYHDLLKIIKDKDFLDNEENEDILEDIVLTLTLFEDREMIEERLKTYAHLFDDKVMKQLKRRRYTGWGRLSRKLINGIRDKQSGKTILDFLKSDGFANRNFMQLIHDDSLTFKEDIQKAQVSGQGDSLHEHIANLAGSPAIKKGILQTVKVVDELVKVMGRHKPENIVIEMARENQTTQKGQKNSRERMKRIEEGIKELGSQILKEHPVENTQLQNEKLYLYYLQNGRDMYVDQELDINRLSDYDVDHIVPQSFLKDDSIDNKVLTRSDKARGKSDNVPSEEVVKKMKNYWRQLLNAKLITQRKFDNLTKAERGGLSELDKAGFIKRQLVETRQITKHVAQILDSRMNTKYDENDKLIREVKVITLKSKLVSDFRKDFQFYKVREINNYHHAHDAYLNAVVGTALIKKYPKLESEFVYGDYKVYDVRKMIAKSEQEIGKATAKYFFYSNIMNFFKTEITLANGEIRKRPLIETNGETGEIVWDKGRDFATVRKVLSMPQVNIVKKTEVQTGGFSKESILPKRNSDKLIARKKDWDPKKYGGFDSPTVAYSVLVVAKVEKGKSKKLKSVKELLGITIMERSSFEKNPIDFLEAKGYKEVKKDLIIKLPKYSLFELENGRKRMLASAGELQKGNELALPSKYVNFLYLASHYEKLKGSPEDNEQKQLFVEQHKHYLDEIIEQISEFSKRVILADANLDKVLSAYNKHRDKPIREQAENIIHLFTLTNLGAPAAFKYFDTTIDRKRYTSTKEVLDATLIHQSITGLYETRIDLSQLGGDGGAEAAAKEAAAKEAAAKEAAAKALEAEAAAKEAAAKEAAAKEAAAKAGGAVLGLEHLPRPPQISQFPLNPERLQALQHLVRKALEAGHIEPYTGPGNNPVFPVKKANGTWRFIHDLRATNSLTIDLSSSSPGPPDLSSLPTTLAHLQTIDLRDAFFQIPLPKQFQPYFAFTVPQQCNYGPGTRYAWKVLPQGFKNSPTLFEMQLAHILQPIRQAFPQCTILQYMDDILLASPSHEDLLLLSEATMASLISHGLPVSENKTQQTPGTIKFLGQIISPNHLTYDAVPTVPIRSRWALPELQALLGEIQWVSKGTPTLRQPLHSLYCALQRHTDPRDQIYLNPSQVQSLVQLRQALSQNCRSRLVQTLPLLGAIMLTLTGTTTVVFQSKEQWPLVWLHAPLPHTSQCPWGQLLASAVLLLDKYTLQSYGLLCQTIHHNISTQTFNQFIQTSDHPSVPILLHHSHRFKNLGAQTGELWNTFLKTAAPLAPVKALMPVFTLSPVIINTAPCLFSDGSTSRAAYILWDKQILSQRSFPLPPPHKSAQRAELLGLLHGLSSARSWRCLNIFLDSKYLYHYLRTLALGTFQGRSSQAPFQALLPRLLSRKVVYLHHVRSHTNLPDPISRLNALTDALLITPVLQLAGKRTADGSEFEKRTADGSEFESPKKKAKVEGSGEGRGSLLTCGDVEENPG

SEQ ID NO: 3764 - protein, 2027 aa, synthetic construct
MAPKKKRKVGIHGVPAADKKYSIGLDIGTNSVGWAVITDEYKVPSKKFKVLGNTDRHSIKKNLIGALLFDSGETAEATRLKRTARRRYTRRKNRICYLQEIFSNEMAKVDDSFFHRLEESFLVEEDKKHERHPIFGNIVDEVAYHEKYPTIYHLRKKLVDSTDKADLRLIYLALAHMIKFRGHFLIEGDLNPDNSDVDKLFIQLVQTYNQLFEENPINASGVDAKAILSARLSKSRRLENLIAQLPGEKKNGLFGNLIALSLGLTPNFKSNFDLAEDAKLQLSKDTYDDDLDNLLAQIGDQYADLFLAAKNLSDAILLSDILRVNTEITKAPLSASMIKRYDEHHQDLTLLKALVRQQLPEKYKEIFFDQSKNGYAGYIDGGASQEEFYKFIKPILEKMDGTEELLVKLNREDLLRKQRTFDNGSIPHQIHLGELHAILRRQEDFYPFLKDNREKIEKILTFRIPYYVGPLARGNSRFAWMTRKSEETITPWNFEEVVDKGASAQSFIERMTNFDKNLPNEKVLPKHSLLYEYFTVYNELTKVKYVTEGMRKPAFLSGEQKKAIVDLLFKTNRKVTVKQLKEDYFKKIECFDSVEISGVEDRFNASLGTYHDLLKIIKDKDFLDNEENEDILEDIVLTLTLFEDREMIEERLKTYAHLFDDKVMKQLKRRRYTGWGRLSRKLINGIRDKQSGKTILDFLKSDGFANRNFMQLIHDDSLTFKEDIQKAQVSGQGDSLHEHIANLAGSPAIKKGILQTVKVVDELVKVMGRHKPENIVIEMARENQTTQKGQKNSRERMKRIEEGIKELGSQILKEHPVENTQLQNEKLYLYYLQNGRDMYVDQELDINRLSDYDVDHIVPQSFLKDDSIDNKVLTRSDKARGKSDNVPSEEVVKKMKNYWRQLLNAKLITQRKFDNLTKAERGGLSELDKAGFIKRQLVETRQITKHVAQILDSRMNTKYDENDKLIREVKVITLKSKLVSDFRKDFQFYKVREINNYHHAHDAYLNAVVGTALIKKYPKLESEFVYGDYKVYDVRKMIAKSEQEIGKATAKYFFYSNIMNFFKTEITLANGEIRKRPLIETNGETGEIVWDKGRDFATVRKVLSMPQVNIVKKTEVQTGGFSKESILPKRNSDKLIARKKDWDPKKYGGFDSPTVAYSVLVVAKVEKGKSKKLKSVKELLGITIMERSSFEKNPIDFLEAKGYKEVKKDLIIKLPKYSLFELENGRKRMLASAGELQKGNELALPSKYVNFLYLASHYEKLKGSPEDNEQKQLFVEQHKHYLDEIIEQISEFSKRVILADANLDKVLSAYNKHRDKPIREQAENIIHLFTLTNLGAPAAFKYFDTTIDRKRYTSTKEVLDATLIHQSITGLYETRIDLSQLGGDSGGSSGGSSGSETPGTSESATPESSGGSSGGSSNQVGHRRIKPHNIATGTLAPRPQKQYPINPKAKPSIQIVIDDLLKQGVLIQQNSTMNTPVYPVPKPDGKWRMVLDYREVNKTIPLIAAQNQHSAGILSSIYRGKYKTTLDLTNGFWAHPITPESYWLTAFTWQGKQYCWTRLPQGFLNSPALFNADVVDLLKEIPNVQAYVDDIYISHDDPQEHLEQLEKIFSILLNAGYVVSLKKSEIAQREVEFLGFNITKEGRGLTDTFKQKLLNITPPKDLKQLQSILGKLNFARNFIPNYSELVKPLYTIVANANGKFISWTEDNSNQLQHIISVLNQADNLEERNPETRLIIKVNSSPSAGYIRYYNEGSKRPIMYVNYIFSKAEAKFTQTEKLLTTMHKGLIKAMDLAMGQEILVYSPIVSMTKIQRTPLPERKALPVRWITWMTYLEDPRIQFHYDKSLPELQQIPNVTEDVIAKTKHPSEFAMVFYTDGSAIKHPDVNKSHSAGMGIAQVQFIPEYKIVHQWSIPLGDHTAQLAEIAAVEFACKKALKISGPVLIVTDSFYVAESANKELPYWKSNGFLNNKKKPLRHVSKWKSIAECLQLKPDIIIMHEKGHQQPMTTLHTEGNNLADKLATQGSYVVHC

SEQ ID NO: 3765 - protein, 2050 aa, synthetic construct
MKRTADGSEFESPKKKRKVDKKYSIGLDIGTNSVGWAVITDEYKVPSKKFKVLGNTDRHSIKKNLIGALLFDSGETAEATRLKRTARRRYTRRKNRICYLQEIFSNEMAKVDDSFFHRLEESFLVEEDKKHERHPIFGNIVDEVAYHEKYPTIYHLRKKLVDSTDKADLRLIYLALAHMIKFRGHFLIEGDLNPDNSDVDKLFIQLVQTYNQLFEENPINASGVDAKAILSARLSKSRRLENLIAQLPGEKKNGLFGNLIALSLGLTPNFKSNFDLAEDAKLQLSKDTYDDDLDNLLAQIGDQYADLFLAAKNLSDAILLSDILRVNTEITKAPLSASMIKRYDEHHQDLTLLKALVRQQLPEKYKEIFFDQSKNGYAGYIDGGASQEEFYKFIKPILEKMDGTEELLVKLNREDLLRKQRTFDNGSIPHQIHLGELHAILRRQEDFYPFLKDNREKIEKILTFRIPYYVGPLARGNSRFAWMTRKSEETITPWNFEEVVDKGASAQSFIERMTNFDKNLPNEKVLPKHSLLYEYFTVYNELTKVKYVTEGMRKPAFLSGEQKKAIVDLLFKTNRKVTVKQLKEDYFKKIECFDSVEISGVEDRFNASLGTYHDLLKIIKDKDFLDNEENEDILEDIVLTLTLFEDREMIEERLKTYAHLFDDKVMKQLKRRRYTGWGRLSRKLINGIRDKQSGKTILDFLKSDGFANRNFMQLIHDDSLTFKEDIQKAQVSGQGDSLHEHIANLAGSPAIKKGILQTVKVVDELVKVMGRHKPENIVIEMARENQTTQKGQKNSRERMKRIEEGIKELGSQILKEHPVENTQLQNEKLYLYYLQNGRDMYVDQELDINRLSDYDVDHIVPQSFLKDDSIDNKVLTRSDKARGKSDNVPSEEVVKKMKNYWRQLLNAKLITQRKFDNLTKAERGGLSELDKAGFIKRQLVETRQITKHVAQILDSRMNTKYDENDKLIREVKVITLKSKLVSDFRKDFQFYKVREINNYHHAHDAYLNAVVGTALIKKYPKLESEFVYGDYKVYDVRKMIAKSEQEIGKATAKYFFYSNIMNFFKTEITLANGEIRKRPLIETNGETGEIVWDKGRDFATVRKVLSMPQVNIVKKTEVQTGGFSKESILPKRNSDKLIARKKDWDPKKYGGFDSPTVAYSVLVVAKVEKGKSKKLKSVKELLGITIMERSSFEKNPIDFLEAKGYKEVKKDLIIKLPKYSLFELENGRKRMLASAGELQKGNELALPSKYVNFLYLASHYEKLKGSPEDNEQKQLFVEQHKHYLDEIIEQISEFSKRVILADANLDKVLSAYNKHRDKPIREQAENIIHLFTLTNLGAPAAFKYFDTTIDRKRYTSTKEVLDATLIHQSITGLYETRIDLSQLGGDSGGSSGGSSGSETPGTSESATPESSGGSSGGSSNQVGHRRIKPHNIATGTLAPRPQKQYPINPKAKPSIQIVIDDLLKQGVLIQQNSTMNTPVYPVPKPDGKWRMVLDYREVNKTIPLIAAQNQHSAGILSSIYRGKYKTTLDLTNGFWAHPITPESYWLTAFTWQGKQYCWTRLPQGFLNSPALFNADVVDLLKEIPNVQAYVDDIYISHDDPQEHLEQLEKIFSILLNAGYVVSLKKSEIAQREVEFLGFNITKEGRGLTDTFKQKLLNITPPKDLKQLQSILGKLNFARNFIPNYSELVKPLYTIVANANGKFISWTEDNSNQLQHIISVLNQADNLEERNPETRLIIKVNSSPSAGYIRYYNEGSKRPIMYVNYIFSKAEAKFTQTEKLLTTMHKGLIKAMDLAMGQEILVYSPIVSMTKIQRTPLPERKALPVRWITWMTYLEDPRIQFHYDKSLPELQQIPNVTEDVIAKTKHPSEFAMVFYTDGSAIKHPDVNKSHSAGMGIAQVQFIPEYKIVHQWSIPLGDHTAQLAEIAAVEFACKKALKISGPVLIVTDSFYVAESANKELPYWKSNGFLNNKKKPLRHVSKWKSIAECLQLKPDIIIMHEKGHQQPMTTLHTEGNNLADKLATQGSYVVHCSGGSKRTADGSEFEPKKKRKV

SEQ ID NO: 3766 - protein, 2055 aa, synthetic construct
MPAAKRVKLDGGDKKYSIGLDIGTNSVGWAVITDEYKVPSKKFKVLGNTDRHSIKKNLIGALLFDSGETAEATRLKRTARRRYTRRKNRICYLQEIFSNEMAKVDDSFFHRLEESFLVEEDKKHERHPIFGNIVDEVAYHEKYPTIYHLRKKLVDSTDKADLRLIYLALAHMIKFRGHFLIEGDLNPDNSDVDKLFIQLVQTYNQLFEENPINASGVDAKAILSARLSKSRRLENLIAQLPGEKKNGLFGNLIALSLGLTPNFKSNFDLAEDAKLQLSKDTYDDDLDNLLAQIGDQYADLFLAAKNLSDAILLSDILRVNTEITKAPLSASMIKRYDEHHQDLTLLKALVRQQLPEKYKEIFFDQSKNGYAGYIDGGASQEEFYKFIKPILEKMDGTEELLVKLNREDLLRKQRTFDNGSIPHQIHLGELHAILRRQEDFYPFLKDNREKIEKILTFRIPYYVGPLARGNSRFAWMTRKSEETITPWNFEEVVDKGASAQSFIERMTNFDKNLPNEKVLPKHSLLYEYFTVYNELTKVKYVTEGMRKPAFLSGEQKKAIVDLLFKTNRKVTVKQLKEDYFKKIECFDSVEISGVEDRFNASLGTYHDLLKIIKDKDFLDNEENEDILEDIVLTLTLFEDREMIEERLKTYAHLFDDKVMKQLKRRRYTGWGRLSRKLINGIRDKQSGKTILDFLKSDGFANRNFMQLIHDDSLTFKEDIQKAQVSGQGDSLHEHIANLAGSPAIKKGILQTVKVVDELVKVMGRHKPENIVIEMARENQTTQKGQKNSRERMKRIEEGIKELGSQILKEHPVENTQLQNEKLYLYYLQNGRDMYVDQELDINRLSDYDVDHIVPQSFLKDDSIDNKVLTRSDKARGKSDNVPSEEVVKKMKNYWRQLLNAKLITQRKFDNLTKAERGGLSELDKAGFIKRQLVETRQITKHVAQILDSRMNTKYDENDKLIREVKVITLKSKLVSDFRKDFQFYKVREINNYHHAHDAYLNAVVGTALIKKYPKLESEFVYGDYKVYDVRKMIAKSEQEIGKATAKYFFYSNIMNFFKTEITLANGEIRKRPLIETNGETGEIVWDKGRDFATVRKVLSMPQVNIVKKTEVQTGGFSKESILPKRNSDKLIARKKDWDPKKYGGFDSPTVAYSVLVVAKVEKGKSKKLKSVKELLGITIMERSSFEKNPIDFLEAKGYKEVKKDLIIKLPKYSLFELENGRKRMLASAGELQKGNELALPSKYVNFLYLASHYEKLKGSPEDNEQKQLFVEQHKHYLDEIIEQISEFSKRVILADANLDKVLSAYNKHRDKPIREQAENIIHLFTLTNLGAPAAFKYFDTTIDRKRYTSTKEVLDATLIHQSITGLYETRIDLSQLGGDSGGSSGGSSGSETPGTSESATPESSGGSSGGSSNQVGHRRIKPHNIATGTLAPRPQKQYPINPKAKPSIQIVIDDLLKQGVLIQQNSTMNTPVYPVPKPDGKWRMVLDYREVNKTIPLIAAQNQHSAGILSSIYRGKYKTTLDLTNGFWAHPITPESYWLTAFTWQGKQYCWTRLPQGFLNSPALFNADVVDLLKEIPNVQAYVDDIYISHDDPQEHLEQLEKIFSILLNAGYVVSLKKSEIAQREVEFLGFNITKEGRGLTDTFKQKLLNITPPKDLKQLQSILGKLNFARNFIPNYSELVKPLYTIVANANGKFISWTEDNSNQLQHIISVLNQADNLEERNPETRLIIKVNSSPSAGYIRYYNEGSKRPIMYVNYIFSKAEAKFTQTEKLLTTMHKGLIKAMDLAMGQEILVYSPIVSMTKIQRTPLPERKALPVRWITWMTYLEDPRIQFHYDKSLPELQQIPNVTEDVIAKTKHPSEFAMVFYTDGSAIKHPDVNKSHSAGMGIAQVQFIPEYKIVHQWSIPLGDHTAQLAEIAAVEFACKKALKISGPVLIVTDSFYVAESANKELPYWKSNGFLNNKKKPLRHVSKWKSIAECLQLKPDIIIMHEKGHQQPMTTLHTEGNNLADKLATQGSYVVHCSGGSKRTADGSEFEKRTADGSEFESPKKKAKVE

SEQ ID NO: 3767 - protein, 2129 aa, synthetic construct
MPAAKRVKLDGGDKKYSIGLDIGTNSVGWAVITDEYKVPSKKFKVLGNTDRHSIKKNLIGALLFDSGETAEATRLKRTARRRYTRRKNRICYLQEIFSNEMAKVDDSFFHRLEESFLVEEDKKHERHPIFGNIVDEVAYHEKYPTIYHLRKKLVDSTDKADLRLIYLALAHMIKFRGHFLIEGDLNPDNSDVDKLFIQLVQTYNQLFEENPINASGVDAKAILSARLSKSRRLENLIAQLPGEKKNGLFGNLIALSLGLTPNFKSNFDLAEDAKLQLSKDTYDDDLDNLLAQIGDQYADLFLAAKNLSDAILLSDILRVNTEITKAPLSASMIKRYDEHHQDLTLLKALVRQQLPEKYKEIFFDQSKNGYAGYIDGGASQEEFYKFIKPILEKMDGTEELLVKLNREDLLRKQRTFDNGSIPHQIHLGELHAILRRQEDFYPFLKDNREKIEKILTFRIPYYVGPLARGNSRFAWMTRKSEETITPWNFEEVVDKGASAQSFIERMTNFDKNLPNEKVLPKHSLLYEYFTVYNELTKVKYVTEGMRKPAFLSGEQKKAIVDLLFKTNRKVTVKQLKEDYFKKIECFDSVEISGVEDRFNASLGTYHDLLKIIKDKDFLDNEENEDILEDIVLTLTLFEDREMIEERLKTYAHLFDDKVMKQLKRRRYTGWGRLSRKLINGIRDKQSGKTILDFLKSDGFANRNFMQLIHDDSLTFKEDIQKAQVSGQGDSLHEHIANLAGSPAIKKGILQTVKVVDELVKVMGRHKPENIVIEMARENQTTQKGQKNSRERMKRIEEGIKELGSQILKEHPVENTQLQNEKLYLYYLQNGRDMYVDQELDINRLSDYDVDHIVPQSFLKDDSIDNKVLTRSDKARGKSDNVPSEEVVKKMKNYWRQLLNAKLITQRKFDNLTKAERGGLSELDKAGFIKRQLVETRQITKHVAQILDSRMNTKYDENDKLIREVKVITLKSKLVSDFRKDFQFYKVREINNYHHAHDAYLNAVVGTALIKKYPKLESEFVYGDYKVYDVRKMIAKSEQEIGKATAKYFFYSNIMNFFKTEITLANGEIRKRPLIETNGETGEIVWDKGRDFATVRKVLSMPQVNIVKKTEVQTGGFSKESILPKRNSDKLIARKKDWDPKKYGGFDSPTVAYSVLVVAKVEKGKSKKLKSVKELLGITIMERSSFEKNPIDFLEAKGYKEVKKDLIIKLPKYSLFELENGRKRMLASAGELQKGNELALPSKYVNFLYLASHYEKLKGSPEDNEQKQLFVEQHKHYLDEIIEQISEFSKRVILADANLDKVLSAYNKHRDKPIREQAENIIHLFTLTNLGAPAAFKYFDTTIDRKRYTSTKEVLDATLIHQSITGLYETRIDLSQLGGDGGSGGSSGGSSGSETPGTSESATPESSGGSSGGSSGGVPWLMKKPLQLTVLVPLHEYQERLLQQTALPKEQKELLQKLFLKYDALWQHWENQVGHRRIKPHNIATGTLAPRPQKQYPINPKAKPSIQIVIDDLLKQGVLIQQNSTMNTPVYPVPKPDGKWRMVLDYREVNKTIPLIAAQNQHSAGILSSIYRGKYKTTLDLTNGFWAHPITPESYWLTAFTWQGKQYCWTRLPQGFLNSPALFNADVVDLLKEIPNVQAYVDDIYISHDDPQEHLEQLEKIFSILLNAGYVVSLKKSEIAQREVEFLGFNITKEGRGLTDTFKQKLLNITPPKDLKQLQSILGKLNFARNFIPNYSELVKPLYTIVAPANGKFISWTEDNSNQLQHIISVLNQADNLEERNPETRLIIKVNSSPSAGYIRYYNEGSKRPIMYVNYIFSKAEAKFTQTEKLLTTMHKGLIKAMDLAMGQEILVYSPIVSMTKIQRTPLPERKALPVRWITWMTYLEDPRIQFHYDKSLPELQQIPNVTEDVIAKTKHPSEFAMVFYTDGSAIKHPDVNKSHSAGMGIAQVQFIPEYKIVHQWSIPLGDHTAQLAEIAAVEFACKKALKISGPVLIVTDSFYVAESANKELPYWKSNGFLNNKKKPLRHVSKWKSIAECLQLKPDIIIMHEKGHQQPMTTLHTEGNNLADKLATQGSYVVHAGKRTADGSEFEKRTADGSEFESPKKKAKVEGSGEGRGSLLTCGDVEENPG

SEQ ID NO: 3768 - protein, 2116 aa, synthetic construct
MPAAKRVKLDGGDKKYSIGLDIGTNSVGWAVITDEYKVPSKKFKVLGNTDRHSIKKNLIGALLFDSGETAEATRLKRTARRRYTRRKNRICYLQEIFSNEMAKVDDSFFHRLEESFLVEEDKKHERHPIFGNIVDEVAYHEKYPTIYHLRKKLVDSTDKADLRLIYLALAHMIKFRGHFLIEGDLNPDNSDVDKLFIQLVQTYNQLFEENPINASGVDAKAILSARLSKSRRLENLIAQLPGEKKNGLFGNLIALSLGLTPNFKSNFDLAEDAKLQLSKDTYDDDLDNLLAQIGDQYADLFLAAKNLSDAILLSDILRVNTEITKAPLSASMIKRYDEHHQDLTLLKALVRQQLPEKYKEIFFDQSKNGYAGYIDGGASQEEFYKFIKPILEKMDGTEELLVKLNREDLLRKQRTFDNGSIPHQIHLGELHAILRRQEDFYPFLKDNREKIEKILTFRIPYYVGPLARGNSRFAWMTRKSEETITPWNFEEVVDKGASAQSFIERMTNFDKNLPNEKVLPKHSLLYEYFTVYNELTKVKYVTEGMRKPAFLSGEQKKAIVDLLFKTNRKVTVKQLKEDYFKKIECFDSVEISGVEDRFNASLGTYHDLLKIIKDKDFLDNEENEDILEDIVLTLTLFEDREMIEERLKTYAHLFDDKVMKQLKRRRYTGWGRLSRKLINGIRDKQSGKTILDFLKSDGFANRNFMQLIHDDSLTFKEDIQKAQVSGQGDSLHEHIANLAGSPAIKKGILQTVKVVDELVKVMGRHKPENIVIEMARENQTTQKGQKNSRERMKRIEEGIKELGSQILKEHPVENTQLQNEKLYLYYLQNGRDMYVDQELDINRLSDYDVDHIVPQSFLKDDSIDNKVLTRSDKARGKSDNVPSEEVVKKMKNYWRQLLNAKLITQRKFDNLTKAERGGLSELDKAGFIKRQLVETRQITKHVAQILDSRMNTKYDENDKLIREVKVITLKSKLVSDFRKDFQFYKVREINNYHHAHDAYLNAVVGTALIKKYPKLESEFVYGDYKVYDVRKMIAKSEQEIGKATAKYFFYSNIMNFFKTEITLANGEIRKRPLIETNGETGEIVWDKGRDFATVRKVLSMPQVNIVKKTEVQTGGFSKESILPKRNSDKLIARKKDWDPKKYGGFDSPTVAYSVLVVAKVEKGKSKKLKSVKELLGITIMERSSFEKNPIDFLEAKGYKEVKKDLIIKLPKYSLFELENGRKRMLASAGELQKGNELALPSKYVNFLYLASHYEKLKGSPEDNEQKQLFVEQHKHYLDEIIEQISEFSKRVILADANLDKVLSAYNKHRDKPIREQAENIIHLFTLTNLGAPAAFKYFDTTIDRKRYTSTKEVLDATLIHQSITGLYETRIDLSQLGGDGGEAAAKEAAAKEAAAKEAAAKGGVPWLMKKPLQLTVLVPLHEYQERLLQQTALPKEQKELLQKLFLKYDALWQHWENQVGHRRIKPHNIATGTLAPRPQKQYPINPKAKPSIQIVIDDLLKQGVLIQQNSTMNTPVYPVPKPDGKWRMVLDYREVNKTIPLIAAQNQHSAGILSSIYRGKYKTTLDLTNGFWAHPITPESYWLTAFTWQGKQYCWTRLPQGFLNSPALFNADVVDLLKEIPNVQAYVDDIYISHDDPQEHLEQLEKIFSILLNAGYVVSLKKSEIAQREVEFLGFNITKEGRGLTDTFKQKLLNITPPKDLKQLQSILGKLNFARNFIPNYSELVKPLYTIVAPANGKFISWTEDNSNQLQHIISVLNQADNLEERNPETRLIIKVNSSPSAGYIRYYNEGSKRPIMYVNYIFSKAEAKFTQTEKLLTTMHKGLIKAMDLAMGQEILVYSPIVSMTKIQRTPLPERKALPVRWITWMTYLEDPRIQFHYDKSLPELQQIPNVTEDVIAKTKHPSEFAMVFYTDGSAIKHPDVNKSHSAGMGIAQVQFIPEYKIVHQWSIPLGDHTAQLAEIAAVEFACKKALKISGPVLIVTDSFYVAESANKELPYWKSNGFLNNKKKPLRHVSKWKSIAECLQLKPDIIIMHEKGHQQPMTTLHTEGNNLADKLATQGSYVVHAGKRTADGSEFEKRTADGSEFESPKKKAKVEGSGEGRGSLLTCGDVEENPG

SEQ ID NO: 3769 - protein, 2126 aa, synthetic construct
MPAAKRVKLDGGDKKYSIGLDIGTNSVGWAVITDEYKVPSKKFKVLGNTDRHSIKKNLIGALLFDSGETAEATRLKRTARRRYTRRKNRICYLQEIFSNEMAKVDDSFFHRLEESFLVEEDKKHERHPIFGNIVDEVAYHEKYPTIYHLRKKLVDSTDKADLRLIYLALAHMIKFRGHFLIEGDLNPDNSDVDKLFIQLVQTYNQLFEENPINASGVDAKAILSARLSKSRRLENLIAQLPGEKKNGLFGNLIALSLGLTPNFKSNFDLAEDAKLQLSKDTYDDDLDNLLAQIGDQYADLFLAAKNLSDAILLSDILRVNTEITKAPLSASMIKRYDEHHQDLTLLKALVRQQLPEKYKEIFFDQSKNGYAGYIDGGASQEEFYKFIKPILEKMDGTEELLVKLNREDLLRKQRTFDNGSIPHQIHLGELHAILRRQEDFYPFLKDNREKIEKILTFRIPYYVGPLARGNSRFAWMTRKSEETITPWNFEEVVDKGASAQSFIERMTNFDKNLPNEKVLPKHSLLYEYFTVYNELTKVKYVTEGMRKPAFLSGEQKKAIVDLLFKTNRKVTVKQLKEDYFKKIECFDSVEISGVEDRFNASLGTYHDLLKIIKDKDFLDNEENEDILEDIVLTLTLFEDREMIEERLKTYAHLFDDKVMKQLKRRRYTGWGRLSRKLINGIRDKQSGKTILDFLKSDGFANRNFMQLIHDDSLTFKEDIQKAQVSGQGDSLHEHIANLAGSPAIKKGILQTVKVVDELVKVMGRHKPENIVIEMARENQTTQKGQKNSRERMKRIEEGIKELGSQILKEHPVENTQLQNEKLYLYYLQNGRDMYVDQELDINRLSDYDVDHIVPQSFLKDDSIDNKVLTRSDKARGKSDNVPSEEVVKKMKNYWRQLLNAKLITQRKFDNLTKAERGGLSELDKAGFIKRQLVETRQITKHVAQILDSRMNTKYDENDKLIREVKVITLKSKLVSDFRKDFQFYKVREINNYHHAHDAYLNAVVGTALIKKYPKLESEFVYGDYKVYDVRKMIAKSEQEIGKATAKYFFYSNIMNFFKTEITLANGEIRKRPLIETNGETGEIVWDKGRDFATVRKVLSMPQVNIVKKTEVQTGGFSKESILPKRNSDKLIARKKDWDPKKYGGFDSPTVAYSVLVVAKVEKGKSKKLKSVKELLGITIMERSSFEKNPIDFLEAKGYKEVKKDLIIKLPKYSLFELENGRKRMLASAGELQKGNELALPSKYVNFLYLASHYEKLKGSPEDNEQKQLFVEQHKHYLDEIIEQISEFSKRVILADANLDKVLSAYNKHRDKPIREQAENIIHLFTLTNLGAPAAFKYFDTTIDRKRYTSTKEVLDATLIHQSITGLYETRIDLSQLGGDGGEAAAKEAAAKEAAAKEAAAKEAAAKEAAAKGGVPWLMKKPLQLTVLVPLHEYQERLLQQTALPKEQKELLQKLFLKYDALWQHWENQVGHRRIKPHNIATGTLAPRPQKQYPINPKAKPSIQIVIDDLLKQGVLIQQNSTMNTPVYPVPKPDGKWRMVLDYREVNKTIPLIAAQNQHSAGILSSIYRGKYKTTLDLTNGFWAHPITPESYWLTAFTWQGKQYCWTRLPQGFLNSPALFNADVVDLLKEIPNVQAYVDDIYISHDDPQEHLEQLEKIFSILLNAGYVVSLKKSEIAQREVEFLGFNITKEGRGLTDTFKQKLLNITPPKDLKQLQSILGKLNFARNFIPNYSELVKPLYTIVAPANGKFISWTEDNSNQLQHIISVLNQADNLEERNPETRLIIKVNSSPSAGYIRYYNEGSKRPIMYVNYIFSKAEAKFTQTEKLLTTMHKGLIKAMDLAMGQEILVYSPIVSMTKIQRTPLPERKALPVRWITWMTYLEDPRIQFHYDKSLPELQQIPNVTEDVIAKTKHPSEFAMVFYTDGSAIKHPDVNKSHSAGMGIAQVQFIPEYKIVHQWSIPLGDHTAQLAEIAAVEFACKKALKISGPVLIVTDSFYVAESANKELPYWKSNGFLNNKKKPLRHVSKWKSIAECLQLKPDIIIMHEKGHQQPMTTLHTEGNNLADKLATQGSYVVHAGKRTADGSEFEKRTADGSEFESPKKKAKVEGSGEGRGSLLTCGDVEENPG

SEQ ID NO: 3770 - protein, 2102 aa, synthetic construct
MPAAKRVKLDGGDKKYSIGLDIGTNSVGWAVITDEYKVPSKKFKVLGNTDRHSIKKNLIGALLFDSGETAEATRLKRTARRRYTRRKNRICYLQEIFSNEMAKVDDSFFHRLEESFLVEEDKKHERHPIFGNIVDEVAYHEKYPTIYHLRKKLVDSTDKADLRLIYLALAHMIKFRGHFLIEGDLNPDNSDVDKLFIQLVQTYNQLFEENPINASGVDAKAILSARLSKSRRLENLIAQLPGEKKNGLFGNLIALSLGLTPNFKSNFDLAEDAKLQLSKDTYDDDLDNLLAQIGDQYADLFLAAKNLSDAILLSDILRVNTEITKAPLSASMIKRYDEHHQDLTLLKALVRQQLPEKYKEIFFDQSKNGYAGYIDGGASQEEFYKFIKPILEKMDGTEELLVKLNREDLLRKQRTFDNGSIPHQIHLGELHAILRRQEDFYPFLKDNREKIEKILTFRIPYYVGPLARGNSRFAWMTRKSEETITPWNFEEVVDKGASAQSFIERMTNFDKNLPNEKVLPKHSLLYEYFTVYNELTKVKYVTEGMRKPAFLSGEQKKAIVDLLFKTNRKVTVKQLKEDYFKKIECFDSVEISGVEDRFNASLGTYHDLLKIIKDKDFLDNEENEDILEDIVLTLTLFEDREMIEERLKTYAHLFDDKVMKQLKRRRYTGWGRLSRKLINGIRDKQSGKTILDFLKSDGFANRNFMQLIHDDSLTFKEDIQKAQVSGQGDSLHEHIANLAGSPAIKKGILQTVKVVDELVKVMGRHKPENIVIEMARENQTTQKGQKNSRERMKRIEEGIKELGSQILKEHPVENTQLQNEKLYLYYLQNGRDMYVDQELDINRLSDYDVDHIVPQSFLKDDSIDNKVLTRSDKARGKSDNVPSEEVVKKMKNYWRQLLNAKLITQRKFDNLTKAERGGLSELDKAGFIKRQLVETRQITKHVAQILDSRMNTKYDENDKLIREVKVITLKSKLVSDFRKDFQFYKVREINNYHHAHDAYLNAVVGTALIKKYPKLESEFVYGDYKVYDVRKMIAKSEQEIGKATAKYFFYSNIMNFFKTEITLANGEIRKRPLIETNGETGEIVWDKGRDFATVRKVLSMPQVNIVKKTEVQTGGFSKESILPKRNSDKLIARKKDWDPKKYGGFDSPTVAYSVLVVAKVEKGKSKKLKSVKELLGITIMERSSFEKNPIDFLEAKGYKEVKKDLIIKLPKYSLFELENGRKRMLASAGELQKGNELALPSKYVNFLYLASHYEKLKGSPEDNEQKQLFVEQHKHYLDEIIEQISEFSKRVILADANLDKVLSAYNKHRDKPIREQAENIIHLFTLTNLGAPAAFKYFDTTIDRKRYTSTKEVLDATLIHQSITGLYETRIDLSQLGGDGGGGGGGSGGVPWLMKKPLQLTVLVPLHEYQERLLQQTALPKEQKELLQKLFLKYDALWQHWENQVGHRRIKPHNIATGTLAPRPQKQYPINPKAKPSIQIVIDDLLKQGVLIQQNSTMNTPVYPVPKPDGKWRMVLDYREVNKTIPLIAAQNQHSAGILSSIYRGKYKTTLDLTNGFWAHPITPESYWLTAFTWQGKQYCWTRLPQGFLNSPALFNADVVDLLKEIPNVQAYVDDIYISHDDPQEHLEQLEKIFSILLNAGYVVSLKKSEIAQREVEFLGFNITKEGRGLTDTFKQKLLNITPPKDLKQLQSILGKLNFARNFIPNYSELVKPLYTIVAPANGKFISWTEDNSNQLQHIISVLNQADNLEERNPETRLIIKVNSSPSAGYIRYYNEGSKRPIMYVNYIFSKAEAKFTQTEKLLTTMHKGLIKAMDLAMGQEILVYSPIVSMTKIQRTPLPERKALPVRWITWMTYLEDPRIQFHYDKSLPELQQIPNVTEDVIAKTKHPSEFAMVFYTDGSAIKHPDVNKSHSAGMGIAQVQFIPEYKIVHQWSIPLGDHTAQLAEIAAVEFACKKALKISGPVLIVTDSFYVAESANKELPYWKSNGFLNNKKKPLRHVSKWKSIAECLQLKPDIIIMHEKGHQQPMTTLHTEGNNLADKLATQGSYVVHAGKRTADGSEFEKRTADGSEFESPKKKAKVEGSGEGRGSLLTCGDVEENPG

SEQ ID NO: 3771 - protein, 2105 aa, synthetic construct
MPAAKRVKLDGGDKKYSIGLDIGTNSVGWAVITDEYKVPSKKFKVLGNTDRHSIKKNLIGALLFDSGETAEATRLKRTARRRYTRRKNRICYLQEIFSNEMAKVDDSFFHRLEESFLVEEDKKHERHPIFGNIVDEVAYHEKYPTIYHLRKKLVDSTDKADLRLIYLALAHMIKFRGHFLIEGDLNPDNSDVDKLFIQLVQTYNQLFEENPINASGVDAKAILSARLSKSRRLENLIAQLPGEKKNGLFGNLIALSLGLTPNFKSNFDLAEDAKLQLSKDTYDDDLDNLLAQIGDQYADLFLAAKNLSDAILLSDILRVNTEITKAPLSASMIKRYDEHHQDLTLLKALVRQQLPEKYKEIFFDQSKNGYAGYIDGGASQEEFYKFIKPILEKMDGTEELLVKLNREDLLRKQRTFDNGSIPHQIHLGELHAILRRQEDFYPFLKDNREKIEKILTFRIPYYVGPLARGNSRFAWMTRKSEETITPWNFEEVVDKGASAQSFIERMTNFDKNLPNEKVLPKHSLLYEYFTVYNELTKVKYVTEGMRKPAFLSGEQKKAIVDLLFKTNRKVTVKQLKEDYFKKIECFDSVEISGVEDRFNASLGTYHDLLKIIKDKDFLDNEENEDILEDIVLTLTLFEDREMIEERLKTYAHLFDDKVMKQLKRRRYTGWGRLSRKLINGIRDKQSGKTILDFLKSDGFANRNFMQLIHDDSLTFKEDIQKAQVSGQGDSLHEHIANLAGSPAIKKGILQTVKVVDELVKVMGRHKPENIVIEMARENQTTQKGQKNSRERMKRIEEGIKELGSQILKEHPVENTQLQNEKLYLYYLQNGRDMYVDQELDINRLSDYDVDHIVPQSFLKDDSIDNKVLTRSDKARGKSDNVPSEEVVKKMKNYWRQLLNAKLITQRKFDNLTKAERGGLSELDKAGFIKRQLVETRQITKHVAQILDSRMNTKYDENDKLIREVKVITLKSKLVSDFRKDFQFYKVREINNYHHAHDAYLNAVVGTALIKKYPKLESEFVYGDYKVYDVRKMIAKSEQEIGKATAKYFFYSNIMNFFKTEITLANGEIRKRPLIETNGETGEIVWDKGRDFATVRKVLSMPQVNIVKKTEVQTGGFSKESILPKRNSDKLIARKKDWDPKKYGGFDSPTVAYSVLVVAKVEKGKSKKLKSVKELLGITIMERSSFEKNPIDFLEAKGYKEVKKDLIIKLPKYSLFELENGRKRMLASAGELQKGNELALPSKYVNFLYLASHYEKLKGSPEDNEQKQLFVEQHKHYLDEIIEQISEFSKRVILADANLDKVLSAYNKHRDKPIREQAENIIHLFTLTNLGAPAAFKYFDTTIDRKRYTSTKEVLDATLIHQSITGLYETRIDLSQLGGDGGGGGPAPGGSGGVPWLMKKPLQLTVLVPLHEYQERLLQQTALPKEQKELLQKLFLKYDALWQHWENQVGHRRIKPHNIATGTLAPRPQKQYPINPKAKPSIQIVIDDLLKQGVLIQQNSTMNTPVYPVPKPDGKWRMVLDYREVNKTIPLIAAQNQHSAGILSSIYRGKYKTTLDLTNGFWAHPITPESYWLTAFTWQGKQYCWTRLPQGFLNSPALFNADVVDLLKEIPNVQAYVDDIYISHDDPQEHLEQLEKIFSILLNAGYVVSLKKSEIAQREVEFLGFNITKEGRGLTDTFKQKLLNITPPKDLKQLQSILGKLNFARNFIPNYSELVKPLYTIVAPANGKFISWTEDNSNQLQHIISVLNQADNLEERNPETRLIIKVNSSPSAGYIRYYNEGSKRPIMYVNYIFSKAEAKFTQTEKLLTTMHKGLIKAMDLAMGQEILVYSPIVSMTKIQRTPLPERKALPVRWITWMTYLEDPRIQFHYDKSLPELQQIPNVTEDVIAKTKHPSEFAMVFYTDGSAIKHPDVNKSHSAGMGIAQVQFIPEYKIVHQWSIPLGDHTAQLAEIAAVEFACKKALKISGPVLIVTDSFYVAESANKELPYWKSNGFLNNKKKPLRHVSKWKSIAECLQLKPDIIIMHEKGHQQPMTTLHTEGNNLADKLATQGSYVVHAGKRTADGSEFEKRTADGSEFESPKKKAKVEGSGEGRGSLLTCGDVEENPG

SEQ ID NO: 3772 - protein, 2142 aa, synthetic construct
MPAAKRVKLDGGDKKYSIGLDIGTNSVGWAVITDEYKVPSKKFKVLGNTDRHSIKKNLIGALLFDSGETAEATRLKRTARRRYTRRKNRICYLQEIFSNEMAKVDDSFFHRLEESFLVEEDKKHERHPIFGNIVDEVAYHEKYPTIYHLRKKLVDSTDKADLRLIYLALAHMIKFRGHFLIEGDLNPDNSDVDKLFIQLVQTYNQLFEENPINASGVDAKAILSARLSKSRRLENLIAQLPGEKKNGLFGNLIALSLGLTPNFKSNFDLAEDAKLQLSKDTYDDDLDNLLAQIGDQYADLFLAAKNLSDAILLSDILRVNTEITKAPLSASMIKRYDEHHQDLTLLKALVRQQLPEKYKEIFFDQSKNGYAGYIDGGASQEEFYKFIKPILEKMDGTEELLVKLNREDLLRKQRTFDNGSIPHQIHLGELHAILRRQEDFYPFLKDNREKIEKILTFRIPYYVGPLARGNSRFAWMTRKSEETITPWNFEEVVDKGASAQSFIERMTNFDKNLPNEKVLPKHSLLYEYFTVYNELTKVKYVTEGMRKPAFLSGEQKKAIVDLLFKTNRKVTVKQLKEDYFKKIECFDSVEISGVEDRFNASLGTYHDLLKIIKDKDFLDNEENEDILEDIVLTLTLFEDREMIEERLKTYAHLFDDKVMKQLKRRRYTGWGRLSRKLINGIRDKQSGKTILDFLKSDGFANRNFMQLIHDDSLTFKEDIQKAQVSGQGDSLHEHIANLAGSPAIKKGILQTVKVVDELVKVMGRHKPENIVIEMARENQTTQKGQKNSRERMKRIEEGIKELGSQILKEHPVENTQLQNEKLYLYYLQNGRDMYVDQELDINRLSDYDVDHIVPQSFLKDDSIDNKVLTRSDKARGKSDNVPSEEVVKKMKNYWRQLLNAKLITQRKFDNLTKAERGGLSELDKAGFIKRQLVETRQITKHVAQILDSRMNTKYDENDKLIREVKVITLKSKLVSDFRKDFQFYKVREINNYHHAHDAYLNAVVGTALIKKYPKLESEFVYGDYKVYDVRKMIAKSEQEIGKATAKYFFYSNIMNFFKTEITLANGEIRKRPLIETNGETGEIVWDKGRDFATVRKVLSMPQVNIVKKTEVQTGGFSKESILPKRNSDKLIARKKDWDPKKYGGFDSPTVAYSVLVVAKVEKGKSKKLKSVKELLGITIMERSSFEKNPIDFLEAKGYKEVKKDLIIKLPKYSLFELENGRKRMLASAGELQKGNELALPSKYVNFLYLASHYEKLKGSPEDNEQKQLFVEQHKHYLDEIIEQISEFSKRVILADANLDKVLSAYNKHRDKPIREQAENIIHLFTLTNLGAPAAFKYFDTTIDRKRYTSTKEVLDATLIHQSITGLYETRIDLSQLGGDGGAEAAAKEAAAKEAAAKEAAAKALEAEAAAKEAAAKEAAAKEAAAKAGGVPWLMKKPLQLTVLVPLHEYQERLLQQTALPKEQKELLQKLFLKYDALWQHWENQVGHRRIKPHNIATGTLAPRPQKQYPINPKAKPSIQIVIDDLLKQGVLIQQNSTMNTPVYPVPKPDGKWRMVLDYREVNKTIPLIAAQNQHSAGILSSIYRGKYKTTLDLTNGFWAHPITPESYWLTAFTWQGKQYCWTRLPQGFLNSPALFNADVVDLLKEIPNVQAYVDDIYISHDDPQEHLEQLEKIFSILLNAGYVVSLKKSEIAQREVEFLGFNITKEGRGLTDTFKQKLLNITPPKDLKQLQSILGKLNFARNFIPNYSELVKPLYTIVAPANGKFISWTEDNSNQLQHIISVLNQADNLEERNPETRLIIKVNSSPSAGYIRYYNEGSKRPIMYVNYIFSKAEAKFTQTEKLLTTMHKGLIKAMDLAMGQEILVYSPIVSMTKIQRTPLPERKALPVRWITWMTYLEDPRIQFHYDKSLPELQQIPNVTEDVIAKTKHPSEFAMVFYTDGSAIKHPDVNKSHSAGMGIAQVQFIPEYKIVHQWSIPLGDHTAQLAEIAAVEFACKKALKISGPVLIVTDSFYVAESANKELPYWKSNGFLNNKKKPLRHVSKWKSIAECLQLKPDIIIMHEKGHQQPMTTLHTEGNNLADKLATQGSYVVHAGKRTADGSEFEKRTADGSEFESPKKKAKVEGSGEGRGSLLTCGDVEENPG

SEQ ID NO: 3773 - protein, 2129 aa, synthetic construct
MPAAKRVKLDGGDKKYSIGLDIGTNSVGWAVITDEYKVPSKKFKVLGNTDRHSIKKNLIGALLFDSGETAEATRLKRTARRRYTRRKNRICYLQEIFSNEMAKVDDSFFHRLEESFLVEEDKKHERHPIFGNIVDEVAYHEKYPTIYHLRKKLVDSTDKADLRLIYLALAHMIKFRGHFLIEGDLNPDNSDVDKLFIQLVQTYNQLFEENPINASGVDAKAILSARLSKSRRLENLIAQLPGEKKNGLFGNLIALSLGLTPNFKSNFDLAEDAKLQLSKDTYDDDLDNLLAQIGDQYADLFLAAKNLSDAILLSDILRVNTEITKAPLSASMIKRYDEHHQDLTLLKALVRQQLPEKYKEIFFDQSKNGYAGYIDGGASQEEFYKFIKPILEKMDGTEELLVKLNREDLLRKQRTFDNGSIPHQIHLGELHAILRRQEDFYPFLKDNREKIEKILTFRIPYYVGPLARGNSRFAWMTRKSEETITPWNFEEVVDKGASAQSFIERMTNFDKNLPNEKVLPKHSLLYEYFTVYNELTKVKYVTEGMRKPAFLSGEQKKAIVDLLFKTNRKVTVKQLKEDYFKKIECFDSVEISGVEDRFNASLGTYHDLLKIIKDKDFLDNEENEDILEDIVLTLTLFEDREMIEERLKTYAHLFDDKVMKQLKRRRYTGWGRLSRKLINGIRDKQSGKTILDFLKSDGFANRNFMQLIHDDSLTFKEDIQKAQVSGQGDSLHEHIANLAGSPAIKKGILQTVKVVDELVKVMGRHKPENIVIEMARENQTTQKGQKNSRERMKRIEEGIKELGSQILKEHPVENTQLQNEKLYLYYLQNGRDMYVDQELDINRLSDYDVDHIVPQSFLKDDSIDNKVLTRSDKARGKSDNVPSEEVVKKMKNYWRQLLNAKLITQRKFDNLTKAERGGLSELDKAGFIKRQLVETRQITKHVAQILDSRMNTKYDENDKLIREVKVITLKSKLVSDFRKDFQFYKVREINNYHHAHDAYLNAVVGTALIKKYPKLESEFVYGDYKVYDVRKMIAKSEQEIGKATAKYFFYSNIMNFFKTEITLANGEIRKRPLIETNGETGEIVWDKGRDFATVRKVLSMPQVNIVKKTEVQTGGFSKESILPKRNSDKLIARKKDWDPKKYGGFDSPTVAYSVLVVAKVEKGKSKKLKSVKELLGITIMERSSFEKNPIDFLEAKGYKEVKKDLIIKLPKYSLFELENGRKRMLASAGELQKGNELALPSKYVNFLYLASHYEKLKGSPEDNEQKQLFVEQHKHYLDEIIEQISEFSKRVILADANLDKVLSAYNKHRDKPIREQAENIIHLFTLTNLGAPAAFKYFDTTIDRKRYTSTKEVLDATLIHQSITGLYETRIDLSQLGGDGGSGGSSGGSSGSETPGTSESATPESSGGSSGGSSGGVPWLMKKPLQLTVLVPLHEYQERLLQQTALPKEQKELLQKLFLKYDALWQHWENQVGHRRIKPHNIATGTLAPRPQKQYPINPKAKPSIQIVIDDLLKQGVLIQQNSTMNTPVYPVPKPDGKWRMVLDYREVNKTIPLIAAQNQHSAGILSSIYRGKYKTTLDLTNGFWAHPITPESYWLTAFTWQGKQYCWTRLPQGFLNSPALFNADVVDLLKEIPNVQAYVDDIYISHDDPQEHLEQLEKIFSILLNAGYVVSLKKSEIAQREVEFLGFNITKEGRGLTDTFKQKLLNITPPKDLKQLQSILGLLNFARNFIPNYSELVKPLYTIVAPANGKFISWTEDNSNQLQHIISVLNQADNLEERNPETRLIIKVNSSPSAGYIRYYNEGSKRPIMYVNYIFSKAEAKFTQTEKLLTTMHKGLIKAMDLAMGQEILVYSPIVSMTKIQRTPLPERKALPVRWITWMTYLEDPRIQFHYDKSLPELQQIPNVTEDVIAKTKHPSEFAMVFYTDGSAIKHPDVNKSHSAGMGIAQVQFIPEYKIVHQWSIPLGDHTAQLAEIAAVEFACKKALKISGPVLIVTDSFYVAESANKELPYWKSNGFLNNKKKPLRHVSKWKSIAECLQLKPDIIIMHEKGHQQPMTTLHTEGNNLADKLATQGSYVVHAGKRTADGSEFEKRTADGSEFESPKKKAKVEGSGEGRGSLLTCGDVEENPG

SEQ ID NO: 3774 - protein, 2111 aa, synthetic construct
MPAAKRVKLDGGDKKYSIGLDIGTNSVGWAVITDEYKVPSKKFKVLGNTDRHSIKKNLIGALLFDSGETAEATRLKRTARRRYTRRKNRICYLQEIFSNEMAKVDDSFFHRLEESFLVEEDKKHERHPIFGNIVDEVAYHEKYPTIYHLRKKLVDSTDKADLRLIYLALAHMIKFRGHFLIEGDLNPDNSDVDKLFIQLVQTYNQLFEENPINASGVDAKAILSARLSKSRRLENLIAQLPGEKKNGLFGNLIALSLGLTPNFKSNFDLAEDAKLQLSKDTYDDDLDNLLAQIGDQYADLFLAAKNLSDAILLSDILRVNTEITKAPLSASMIKRYDEHHQDLTLLKALVRQQLPEKYKEIFFDQSKNGYAGYIDGGASQEEFYKFIKPILEKMDGTEELLVKLNREDLLRKQRTFDNGSIPHQIHLGELHAILRRQEDFYPFLKDNREKIEKILTFRIPYYVGPLARGNSRFAWMTRKSEETITPWNFEEVVDKGASAQSFIERMTNFDKNLPNEKVLPKHSLLYEYFTVYNELTKVKYVTEGMRKPAFLSGEQKKAIVDLLFKTNRKVTVKQLKEDYFKKIECFDSVEISGVEDRFNASLGTYHDLLKIIKDKDFLDNEENEDILEDIVLTLTLFEDREMIEERLKTYAHLFDDKVMKQLKRRRYTGWGRLSRKLINGIRDKQSGKTILDFLKSDGFANRNFMQLIHDDSLTFKEDIQKAQVSGQGDSLHEHIANLAGSPAIKKGILQTVKVVDELVKVMGRHKPENIVIEMARENQTTQKGQKNSRERMKRIEEGIKELGSQILKEHPVENTQLQNEKLYLYYLQNGRDMYVDQELDINRLSDYDVDHIVPQSFLKDDSIDNKVLTRSDKARGKSDNVPSEEVVKKMKNYWRQLLNAKLITQRKFDNLTKAERGGLSELDKAGFIKRQLVETRQITKHVAQILDSRMNTKYDENDKLIREVKVITLKSKLVSDFRKDFQFYKVREINNYHHAHDAYLNAVVGTALIKKYPKLESEFVYGDYKVYDVRKMIAKSEQEIGKATAKYFFYSNIMNFFKTEITLANGEIRKRPLIETNGETGEIVWDKGRDFATVRKVLSMPQVNIVKKTEVQTGGFSKESILPKRNSDKLIARKKDWDPKKYGGFDSPTVAYSVLVVAKVEKGKSKKLKSVKELLGITIMERSSFEKNPIDFLEAKGYKEVKKDLIIKLPKYSLFELENGRKRMLASAGELQKGNELALPSKYVNFLYLASHYEKLKGSPEDNEQKQLFVEQHKHYLDEIIEQISEFSKRVILADANLDKVLSAYNKHRDKPIREQAENIIHLFTLTNLGAPAAFKYFDTTIDRKRYTSTKEVLDATLIHQSITGLYETRIDLSQLGGDGGGGGGSEAAAKGGGGSGGVPWLMKKPLQLTVLVPLHEYQERLLQQTALPKEQKELLQKLFLKYDALWQHWENQVGHRRIKPHNIATGTLAPRPQKQYPINPKAKPSIQIVIDDLLKQGVLIQQNSTMNTPVYPVPKPDGKWRMVLDYREVNKTIPLIAAQNQHSAGILSSIYRGKYKTTLDLTNGFWAHPITPESYWLTAFTWQGKQYCWTRLPQGFLNSPALFNADVVDLLKEIPNVQAYVDDIYISHDDPQEHLEQLEKIFSILLNAGYVVSLKKSEIAQREVEFLGFNITKEGRGLTDTFKQKLLNITPPKDLKQLQSILGLLNFARNFIPNYSELVKPLYTIVAPANGKFISWTEDNSNQLQHIISVLNQADNLEERNPETRLIIKVNSSPSAGYIRYYNEGSKRPIMYVNYIFSKAEAKFTQTEKLLTTMHKGLIKAMDLAMGQEILVYSPIVSMTKIQRTPLPERKALPVRWITWMTYLEDPRIQFHYDKSLPELQQIPNVTEDVIAKTKHPSEFAMVFYTDGSAIKHPDVNKSHSAGMGIAQVQFIPEYKIVHQWSIPLGDHTAQLAEIAAVEFACKKALKISGPVLIVTDSFYVAESANKELPYWKSNGFLNNKKKPLRHVSKWKSIAECLQLKPDIIIMHEKGHQQPMTTLHTEGNNLADKLATQGSYVVHAGKRTADGSEFEKRTADGSEFESPKKKAKVEGSGEGRGSLLTCGDVEENPG

SEQ ID NO: 3775 - protein, 2114 aa, synthetic construct
MPAAKRVKLDGGDKKYSIGLDIGTNSVGWAVITDEYKVPSKKFKVLGNTDRHSIKKNLIGALLFDSGETAEATRLKRTARRRYTRRKNRICYLQEIFSNEMAKVDDSFFHRLEESFLVEEDKKHERHPIFGNIVDEVAYHEKYPTIYHLRKKLVDSTDKADLRLIYLALAHMIKFRGHFLIEGDLNPDNSDVDKLFIQLVQTYNQLFEENPINASGVDAKAILSARLSKSRRLENLIAQLPGEKKNGLFGNLIALSLGLTPNFKSNFDLAEDAKLQLSKDTYDDDLDNLLAQIGDQYADLFLAAKNLSDAILLSDILRVNTEITKAPLSASMIKRYDEHHQDLTLLKALVRQQLPEKYKEIFFDQSKNGYAGYIDGGASQEEFYKFIKPILEKMDGTEELLVKLNREDLLRKQRTFDNGSIPHQIHLGELHAILRRQEDFYPFLKDNREKIEKILTFRIPYYVGPLARGNSRFAWMTRKSEETITPWNFEEVVDKGASAQSFIERMTNFDKNLPNEKVLPKHSLLYEYFTVYNELTKVKYVTEGMRKPAFLSGEQKKAIVDLLFKTNRKVTVKQLKEDYFKKIECFDSVEISGVEDRFNASLGTYHDLLKIIKDKDFLDNEENEDILEDIVLTLTLFEDREMIEERLKTYAHLFDDKVMKQLKRRRYTGWGRLSRKLINGIRDKQSGKTILDFLKSDGFANRNFMQLIHDDSLTFKEDIQKAQVSGQGDSLHEHIANLAGSPAIKKGILQTVKVVDELVKVMGRHKPENIVIEMARENQTTQKGQKNSRERMKRIEEGIKELGSQILKEHPVENTQLQNEKLYLYYLQNGRDMYVDQELDINRLSDYDVDHIVPQSFLKDDSIDNKVLTRSDKARGKSDNVPSEEVVKKMKNYWRQLLNAKLITQRKFDNLTKAERGGLSELDKAGFIKRQLVETRQITKHVAQILDSRMNTKYDENDKLIREVKVITLKSKLVSDFRKDFQFYKVREINNYHHAHDAYLNAVVGTALIKKYPKLESEFVYGDYKVYDVRKMIAKSEQEIGKATAKYFFYSNIMNFFKTEITLANGEIRKRPLIETNGETGEIVWDKGRDFATVRKVLSMPQVNIVKKTEVQTGGFSKESILPKRNSDKLIARKKDWDPKKYGGFDSPTVAYSVLVVAKVEKGKSKKLKSVKELLGITIMERSSFEKNPIDFLEAKGYKEVKKDLIIKLPKYSLFELENGRKRMLASAGELQKGNELALPSKYVNFLYLASHYEKLKGSPEDNEQKQLFVEQHKHYLDEIIEQISEFSKRVILADANLDKVLSAYNKHRDKPIREQAENIIHLFTLTNLGAPAAFKYFDTTIDRKRYTSTKEVLDATLIHQSITGLYETRIDLSQLGGDGGGSSGSSGSSGSSGSSGSSGGVPWLMKKPLQLTVLVPLHEYQERLLQQTALPKEQKELLQKLFLKYDALWQHWENQVGHRRIKPHNIATGTLAPRPQKQYPINPKAKPSIQIVIDDLLKQGVLIQQNSTMNTPVYPVPKPDGKWRMVLDYREVNKTIPLIAAQNQHSAGILSSIYRGKYKTTLDLTNGFWAHPITPESYWLTAFTWQGKQYCWTRLPQGFLNSPALFNADVVDLLKEIPNVQAYVDDIYISHDDPQEHLEQLEKIFSILLNAGYVVSLKKSEIAQREVEFLGFNITKEGRGLTDTFKQKLLNITPPKDLKQLQSILGLLNFARNFIPNYSELVKPLYTIVAPANGKFISWTEDNSNQLQHIISVLNQADNLEERNPETRLIIKVNSSPSAGYIRYYNEGSKRPIMYVNYIFSKAEAKFTQTEKLLTTMHKGLIKAMDLAMGQEILVYSPIVSMTKIQRTPLPERKALPVRWITWMTYLEDPRIQFHYDKSLPELQQIPNVTEDVIAKTKHPSEFAMVFYTDGSAIKHPDVNKSHSAGMGIAQVQFIPEYKIVHQWSIPLGDHTAQLAEIAAVEFACKKALKISGPVLIVTDSFYVAESANKELPYWKSNGFLNNKKKPLRHVSKWKSIAECLQLKPDIIIMHEKGHQQPMTTLHTEGNNLADKLATQGSYVVHAGKRTADGSEFEKRTADGSEFESPKKKAKVEGSGEGRGSLLTCGDVEENPG

SEQ ID NO: 3776 - protein, 2102 aa, synthetic construct
MPAAKRVKLDGGDKKYSIGLDIGTNSVGWAVITDEYKVPSKKFKVLGNTDRHSIKKNLIGALLFDSGETAEATRLKRTARRRYTRRKNRICYLQEIFSNEMAKVDDSFFHRLEESFLVEEDKKHERHPIFGNIVDEVAYHEKYPTIYHLRKKLVDSTDKADLRLIYLALAHMIKFRGHFLIEGDLNPDNSDVDKLFIQLVQTYNQLFEENPINASGVDAKAILSARLSKSRRLENLIAQLPGEKKNGLFGNLIALSLGLTPNFKSNFDLAEDAKLQLSKDTYDDDLDNLLAQIGDQYADLFLAAKNLSDAILLSDILRVNTEITKAPLSASMIKRYDEHHQDLTLLKALVRQQLPEKYKEIFFDQSKNGYAGYIDGGASQEEFYKFIKPILEKMDGTEELLVKLNREDLLRKQRTFDNGSIPHQIHLGELHAILRRQEDFYPFLKDNREKIEKILTFRIPYYVGPLARGNSRFAWMTRKSEETITPWNFEEVVDKGASAQSFIERMTNFDKNLPNEKVLPKHSLLYEYFTVYNELTKVKYVTEGMRKPAFLSGEQKKAIVDLLFKTNRKVTVKQLKEDYFKKIECFDSVEISGVEDRFNASLGTYHDLLKIIKDKDFLDNEENEDILEDIVLTLTLFEDREMIEERLKTYAHLFDDKVMKQLKRRRYTGWGRLSRKLINGIRDKQSGKTILDFLKSDGFANRNFMQLIHDDSLTFKEDIQKAQVSGQGDSLHEHIANLAGSPAIKKGILQTVKVVDELVKVMGRHKPENIVIEMARENQTTQKGQKNSRERMKRIEEGIKELGSQILKEHPVENTQLQNEKLYLYYLQNGRDMYVDQELDINRLSDYDVDHIVPQSFLKDDSIDNKVLTRSDKARGKSDNVPSEEVVKKMKNYWRQLLNAKLITQRKFDNLTKAERGGLSELDKAGFIKRQLVETRQITKHVAQILDSRMNTKYDENDKLIREVKVITLKSKLVSDFRKDFQFYKVREINNYHHAHDAYLNAVVGTALIKKYPKLESEFVYGDYKVYDVRKMIAKSEQEIGKATAKYFFYSNIMNFFKTEITLANGEIRKRPLIETNGETGEIVWDKGRDFATVRKVLSMPQVNIVKKTEVQTGGFSKESILPKRNSDKLIARKKDWDPKKYGGFDSPTVAYSVLVVAKVEKGKSKKLKSVKELLGITIMERSSFEKNPIDFLEAKGYKEVKKDLIIKLPKYSLFELENGRKRMLASAGELQKGNELALPSKYVNFLYLASHYEKLKGSPEDNEQKQLFVEQHKHYLDEIIEQISEFSKRVILADANLDKVLSAYNKHRDKPIREQAENIIHLFTLTNLGAPAAFKYFDTTIDRKRYTSTKEVLDATLIHQSITGLYETRIDLSQLGGDGGGGSGGSGGVPWLMKKPLQLTVLVPLHEYQERLLQQTALPKEQKELLQKLFLKYDALWQHWENQVGHRRIKPHNIATGTLAPRPQKQYPINPKAKPSIQIVIDDLLKQGVLIQQNSTMNTPVYPVPKPDGKWRMVLDYREVNKTIPLIAAQNQHSAGILSSIYRGKYKTTLDLTNGFWAHPITPESYWLTAFTWQGKQYCWTRLPQGFLNSPALFNADVVDLLKEIPNVQAYVDDIYISHDDPQEHLEQLEKIFSILLNAGYVVSLKKSEIAQREVEFLGFNITKEGRGLTDTFKQKLLNITPPKDLKQLQSILGLLNFARNFIPNYSELVKPLYTIVAPANGKFISWTEDNSNQLQHIISVLNQADNLEERNPETRLIIKVNSSPSAGYIRYYNEGSKRPIMYVNYIFSKAEAKFTQTEKLLTTMHKGLIKAMDLAMGQEILVYSPIVSMTKIQRTPLPERKALPVRWITWMTYLEDPRIQFHYDKSLPELQQIPNVTEDVIAKTKHPSEFAMVFYTDGSAIKHPDVNKSHSAGMGIAQVQFIPEYKIVHQWSIPLGDHTAQLAEIAAVEFACKKALKISGPVLIVTDSFYVAESANKELPYWKSNGFLNNKKKPLRHVSKWKSIAECLQLKPDIIIMHEKGHQQPMTTLHTEGNNLADKLATQGSYVVHAGKRTADGSEFEKRTADGSEFESPKKKAKVEGSGEGRGSLLTCGDVEENPG

SEQ ID NO: 3777 - protein, 2107 aa, synthetic construct
MPAAKRVKLDGGDKKYSIGLDIGTNSVGWAVITDEYKVPSKKFKVLGNTDRHSIKKNLIGALLFDSGETAEATRLKRTARRRYTRRKNRICYLQEIFSNEMAKVDDSFFHRLEESFLVEEDKKHERHPIFGNIVDEVAYHEKYPTIYHLRKKLVDSTDKADLRLIYLALAHMIKFRGHFLIEGDLNPDNSDVDKLFIQLVQTYNQLFEENPINASGVDAKAILSARLSKSRRLENLIAQLPGEKKNGLFGNLIALSLGLTPNFKSNFDLAEDAKLQLSKDTYDDDLDNLLAQIGDQYADLFLAAKNLSDAILLSDILRVNTEITKAPLSASMIKRYDEHHQDLTLLKALVRQQLPEKYKEIFFDQSKNGYAGYIDGGASQEEFYKFIKPILEKMDGTEELLVKLNREDLLRKQRTFDNGSIPHQIHLGELHAILRRQEDFYPFLKDNREKIEKILTFRIPYYVGPLARGNSRFAWMTRKSEETITPWNFEEVVDKGASAQSFIERMTNFDKNLPNEKVLPKHSLLYEYFTVYNELTKVKYVTEGMRKPAFLSGEQKKAIVDLLFKTNRKVTVKQLKEDYFKKIECFDSVEISGVEDRFNASLGTYHDLLKIIKDKDFLDNEENEDILEDIVLTLTLFEDREMIEERLKTYAHLFDDKVMKQLKRRRYTGWGRLSRKLINGIRDKQSGKTILDFLKSDGFANRNFMQLIHDDSLTFKEDIQKAQVSGQGDSLHEHIANLAGSPAIKKGILQTVKVVDELVKVMGRHKPENIVIEMARENQTTQKGQKNSRERMKRIEEGIKELGSQILKEHPVENTQLQNEKLYLYYLQNGRDMYVDQELDINRLSDYDVDHIVPQSFLKDDSIDNKVLTRSDKARGKSDNVPSEEVVKKMKNYWRQLLNAKLITQRKFDNLTKAERGGLSELDKAGFIKRQLVETRQITKHVAQILDSRMNTKYDENDKLIREVKVITLKSKLVSDFRKDFQFYKVREINNYHHAHDAYLNAVVGTALIKKYPKLESEFVYGDYKVYDVRKMIAKSEQEIGKATAKYFFYSNIMNFFKTEITLANGEIRKRPLIETNGETGEIVWDKGRDFATVRKVLSMPQVNIVKKTEVQTGGFSKESILPKRNSDKLIARKKDWDPKKYGGFDSPTVAYSVLVVAKVEKGKSKKLKSVKELLGITIMERSSFEKNPIDFLEAKGYKEVKKDLIIKLPKYSLFELENGRKRMLASAGELQKGNELALPSKYVNFLYLASHYEKLKGSPEDNEQKQLFVEQHKHYLDEIIEQISEFSKRVILADANLDKVLSAYNKHRDKPIREQAENIIHLFTLTNLGAPAAFKYFDTTIDRKRYTSTKEVLDATLIHQSITGLYETRIDLSQLGGDGGGGSGSSEAAAKGGVPWLMKKPLQLTVLVPLHEYQERLLQQTALPKEQKELLQKLFLKYDALWQHWENQVGHRRIKPHNIATGTLAPRPQKQYPINPKAKPSIQIVIDDLLKQGVLIQQNSTMNTPVYPVPKPDGKWRMVLDYREVNKTIPLIAAQNQHSAGILSSIYRGKYKTTLDLTNGFWAHPITPESYWLTAFTWQGKQYCWTRLPQGFLNSPALFNADVVDLLKEIPNVQAYVDDIYISHDDPQEHLEQLEKIFSILLNAGYVVSLKKSEIAQREVEFLGFNITKEGRGLTDTFKQKLLNITPPKDLKQLQSILGLLNFARNFIPNYSELVKPLYTIVAPANGKFISWTEDNSNQLQHIISVLNQADNLEERNPETRLIIKVNSSPSAGYIRYYNEGSKRPIMYVNYIFSKAEAKFTQTEKLLTTMHKGLIKAMDLAMGQEILVYSPIVSMTKIQRTPLPERKALPVRWITWMTYLEDPRIQFHYDKSLPELQQIPNVTEDVIAKTKHPSEFAMVFYTDGSAIKHPDVNKSHSAGMGIAQVQFIPEYKIVHQWSIPLGDHTAQLAEIAAVEFACKKALKISGPVLIVTDSFYVAESANKELPYWKSNGFLNNKKKPLRHVSKWKSIAECLQLKPDIIIMHEKGHQQPMTTLHTEGNNLADKLATQGSYVVHAGKRTADGSEFEKRTADGSEFESPKKKAKVEGSGEGRGSLLTCGDVEENPG

SEQ ID NO: 3778 - protein, 2107 aa, synthetic construct
MPAAKRVKLDGGDKKYSIGLDIGTNSVGWAVITDEYKVPSKKFKVLGNTDRHSIKKNLIGALLFDSGETAEATRLKRTARRRYTRRKNRICYLQEIFSNEMAKVDDSFFHRLEESFLVEEDKKHERHPIFGNIVDEVAYHEKYPTIYHLRKKLVDSTDKADLRLIYLALAHMIKFRGHFLIEGDLNPDNSDVDKLFIQLVQTYNQLFEENPINASGVDAKAILSARLSKSRRLENLIAQLPGEKKNGLFGNLIALSLGLTPNFKSNFDLAEDAKLQLSKDTYDDDLDNLLAQIGDQYADLFLAAKNLSDAILLSDILRVNTEITKAPLSASMIKRYDEHHQDLTLLKALVRQQLPEKYKEIFFDQSKNGYAGYIDGGASQEEFYKFIKPILEKMDGTEELLVKLNREDLLRKQRTFDNGSIPHQIHLGELHAILRRQEDFYPFLKDNREKIEKILTFRIPYYVGPLARGNSRFAWMTRKSEETITPWNFEEVVDKGASAQSFIERMTNFDKNLPNEKVLPKHSLLYEYFTVYNELTKVKYVTEGMRKPAFLSGEQKKAIVDLLFKTNRKVTVKQLKEDYFKKIECFDSVEISGVEDRFNASLGTYHDLLKIIKDKDFLDNEENEDILEDIVLTLTLFEDREMIEERLKTYAHLFDDKVMKQLKRRRYTGWGRLSRKLINGIRDKQSGKTILDFLKSDGFANRNFMQLIHDDSLTFKEDIQKAQVSGQGDSLHEHIANLAGSPAIKKGILQTVKVVDELVKVMGRHKPENIVIEMARENQTTQKGQKNSRERMKRIEEGIKELGSQILKEHPVENTQLQNEKLYLYYLQNGRDMYVDQELDINRLSDYDVDHIVPQSFLKDDSIDNKVLTRSDKARGKSDNVPSEEVVKKMKNYWRQLLNAKLITQRKFDNLTKAERGGLSELDKAGFIKRQLVETRQITKHVAQILDSRMNTKYDENDKLIREVKVITLKSKLVSDFRKDFQFYKVREINNYHHAHDAYLNAVVGTALIKKYPKLESEFVYGDYKVYDVRKMIAKSEQEIGKATAKYFFYSNIMNFFKTEITLANGEIRKRPLIETNGETGEIVWDKGRDFATVRKVLSMPQVNIVKKTEVQTGGFSKESILPKRNSDKLIARKKDWDPKKYGGFDSPTVAYSVLVVAKVEKGKSKKLKSVKELLGITIMERSSFEKNPIDFLEAKGYKEVKKDLIIKLPKYSLFELENGRKRMLASAGELQKGNELALPSKYVNFLYLASHYEKLKGSPEDNEQKQLFVEQHKHYLDEIIEQISEFSKRVILADANLDKVLSAYNKHRDKPIREQAENIIHLFTLTNLGAPAAFKYFDTTIDRKRYTSTKEVLDATLIHQSITGLYETRIDLSQLGGDGGGGSEAAAKGSSGGVPWLMKKPLQLTVLVPLHEYQERLLQQTALPKEQKELLQKLFLKYDALWQHWENQVGHRRIKPHNIATGTLAPRPQKQYPINPKAKPSIQIVIDDLLKQGVLIQQNSTMNTPVYPVPKPDGKWRMVLDYREVNKTIPLIAAQNQHSAGILSSIYRGKYKTTLDLTNGFWAHPITPESYWLTAFTWQGKQYCWTRLPQGFLNSPALFNADVVDLLKEIPNVQAYVDDIYISHDDPQEHLEQLEKIFSILLNAGYVVSLKKSEIAQREVEFLGFNITKEGRGLTDTFKQKLLNITPPKDLKQLQSILGLLNFARNFIPNYSELVKPLYTIVAPANGKFISWTEDNSNQLQHIISVLNQADNLEERNPETRLIIKVNSSPSAGYIRYYNEGSKRPIMYVNYIFSKAEAKFTQTEKLLTTMHKGLIKAMDLAMGQEILVYSPIVSMTKIQRTPLPERKALPVRWITWMTYLEDPRIQFHYDKSLPELQQIPNVTEDVIAKTKHPSEFAMVFYTDGSAIKHPDVNKSHSAGMGIAQVQFIPEYKIVHQWSIPLGDHTAQLAEIAAVEFACKKALKISGPVLIVTDSFYVAESANKELPYWKSNGFLNNKKKPLRHVSKWKSIAECLQLKPDIIIMHEKGHQQPMTTLHTEGNNLADKLATQGSYVVHAGKRTADGSEFEKRTADGSEFESPKKKAKVEGSGEGRGSLLTCGDVEENPG

SEQ ID NO: 3779 - protein, 2107 aa, synthetic construct
MPAAKRVKLDGGDKKYSIGLDIGTNSVGWAVITDEYKVPSKKFKVLGNTDRHSIKKNLIGALLFDSGETAEATRLKRTARRRYTRRKNRICYLQEIFSNEMAKVDDSFFHRLEESFLVEEDKKHERHPIFGNIVDEVAYHEKYPTIYHLRKKLVDSTDKADLRLIYLALAHMIKFRGHFLIEGDLNPDNSDVDKLFIQLVQTYNQLFEENPINASGVDAKAILSARLSKSRRLENLIAQLPGEKKNGLFGNLIALSLGLTPNFKSNFDLAEDAKLQLSKDTYDDDLDNLLAQIGDQYADLFLAAKNLSDAILLSDILRVNTEITKAPLSASMIKRYDEHHQDLTLLKALVRQQLPEKYKEIFFDQSKNGYAGYIDGGASQEEFYKFIKPILEKMDGTEELLVKLNREDLLRKQRTFDNGSIPHQIHLGELHAILRRQEDFYPFLKDNREKIEKILTFRIPYYVGPLARGNSRFAWMTRKSEETITPWNFEEVVDKGASAQSFIERMTNFDKNLPNEKVLPKHSLLYEYFTVYNELTKVKYVTEGMRKPAFLSGEQKKAIVDLLFKTNRKVTVKQLKEDYFKKIECFDSVEISGVEDRFNASLGTYHDLLKIIKDKDFLDNEENEDILEDIVLTLTLFEDREMIEERLKTYAHLFDDKVMKQLKRRRYTGWGRLSRKLINGIRDKQSGKTILDFLKSDGFANRNFMQLIHDDSLTFKEDIQKAQVSGQGDSLHEHIANLAGSPAIKKGILQTVKVVDELVKVMGRHKPENIVIEMARENQTTQKGQKNSRERMKRIEEGIKELGSQILKEHPVENTQLQNEKLYLYYLQNGRDMYVDQELDINRLSDYDVDHIVPQSFLKDDSIDNKVLTRSDKARGKSDNVPSEEVVKKMKNYWRQLLNAKLITQRKFDNLTKAERGGLSELDKAGFIKRQLVETRQITKHVAQILDSRMNTKYDENDKLIREVKVITLKSKLVSDFRKDFQFYKVREINNYHHAHDAYLNAVVGTALIKKYPKLESEFVYGDYKVYDVRKMIAKSEQEIGKATAKYFFYSNIMNFFKTEITLANGEIRKRPLIETNGETGEIVWDKGRDFATVRKVLSMPQVNIVKKTEVQTGGFSKESILPKRNSDKLIARKKDWDPKKYGGFDSPTVAYSVLVVAKVEKGKSKKLKSVKELLGITIMERSSFEKNPIDFLEAKGYKEVKKDLIIKLPKYSLFELENGRKRMLASAGELQKGNELALPSKYVNFLYLASHYEKLKGSPEDNEQKQLFVEQHKHYLDEIIEQISEFSKRVILADANLDKVLSAYNKHRDKPIREQAENIIHLFTLTNLGAPAAFKYFDTTIDRKRYTSTKEVLDATLIHQSITGLYETRIDLSQLGGDGGGGSPAPEAAAKGGVPWLMKKPLQLTVLVPLHEYQERLLQQTALPKEQKELLQKLFLKYDALWQHWENQVGHRRIKPHNIATGTLAPRPQKQYPINPKAKPSIQIVIDDLLKQGVLIQQNSTMNTPVYPVPKPDGKWRMVLDYREVNKTIPLIAAQNQHSAGILSSIYRGKYKTTLDLTNGFWAHPITPESYWLTAFTWQGKQYCWTRLPQGFLNSPALFNADVVDLLKEIPNVQAYVDDIYISHDDPQEHLEQLEKIFSILLNAGYVVSLKKSEIAQREVEFLGFNITKEGRGLTDTFKQKLLNITPPKDLKQLQSILGLLNFARNFIPNYSELVKPLYTIVAPANGKFISWTEDNSNQLQHIISVLNQADNLEERNPETRLIIKVNSSPSAGYIRYYNEGSKRPIMYVNYIFSKAEAKFTQTEKLLTTMHKGLIKAMDLAMGQEILVYSPIVSMTKIQRTPLPERKALPVRWITWMTYLEDPRIQFHYDKSLPELQQIPNVTEDVIAKTKHPSEFAMVFYTDGSAIKHPDVNKSHSAGMGIAQVQFIPEYKIVHQWSIPLGDHTAQLAEIAAVEFACKKALKISGPVLIVTDSFYVAESANKELPYWKSNGFLNNKKKPLRHVSKWKSIAECLQLKPDIIIMHEKGHQQPMTTLHTEGNNLADKLATQGSYVVHAGKRTADGSEFEKRTADGSEFESPKKKAKVEGSGEGRGSLLTCGDVEENPG

SEQ ID NO: 3780 - protein, 2142 aa, synthetic construct
MPAAKRVKLDGGDKKYSIGLDIGTNSVGWAVITDEYKVPSKKFKVLGNTDRHSIKKNLIGALLFDSGETAEATRLKRTARRRYTRRKNRICYLQEIFSNEMAKVDDSFFHRLEESFLVEEDKKHERHPIFGNIVDEVAYHEKYPTIYHLRKKLVDSTDKADLRLIYLALAHMIKFRGHFLIEGDLNPDNSDVDKLFIQLVQTYNQLFEENPINASGVDAKAILSARLSKSRRLENLIAQLPGEKKNGLFGNLIALSLGLTPNFKSNFDLAEDAKLQLSKDTYDDDLDNLLAQIGDQYADLFLAAKNLSDAILLSDILRVNTEITKAPLSASMIKRYDEHHQDLTLLKALVRQQLPEKYKEIFFDQSKNGYAGYIDGGASQEEFYKFIKPILEKMDGTEELLVKLNREDLLRKQRTFDNGSIPHQIHLGELHAILRRQEDFYPFLKDNREKIEKILTFRIPYYVGPLARGNSRFAWMTRKSEETITPWNFEEVVDKGASAQSFIERMTNFDKNLPNEKVLPKHSLLYEYFTVYNELTKVKYVTEGMRKPAFLSGEQKKAIVDLLFKTNRKVTVKQLKEDYFKKIECFDSVEISGVEDRFNASLGTYHDLLKIIKDKDFLDNEENEDILEDIVLTLTLFEDREMIEERLKTYAHLFDDKVMKQLKRRRYTGWGRLSRKLINGIRDKQSGKTILDFLKSDGFANRNFMQLIHDDSLTFKEDIQKAQVSGQGDSLHEHIANLAGSPAIKKGILQTVKVVDELVKVMGRHKPENIVIEMARENQTTQKGQKNSRERMKRIEEGIKELGSQILKEHPVENTQLQNEKLYLYYLQNGRDMYVDQELDINRLSDYDVDHIVPQSFLKDDSIDNKVLTRSDKARGKSDNVPSEEVVKKMKNYWRQLLNAKLITQRKFDNLTKAERGGLSELDKAGFIKRQLVETRQITKHVAQILDSRMNTKYDENDKLIREVKVITLKSKLVSDFRKDFQFYKVREINNYHHAHDAYLNAVVGTALIKKYPKLESEFVYGDYKVYDVRKMIAKSEQEIGKATAKYFFYSNIMNFFKTEITLANGEIRKRPLIETNGETGEIVWDKGRDFATVRKVLSMPQVNIVKKTEVQTGGFSKESILPKRNSDKLIARKKDWDPKKYGGFDSPTVAYSVLVVAKVEKGKSKKLKSVKELLGITIMERSSFEKNPIDFLEAKGYKEVKKDLIIKLPKYSLFELENGRKRMLASAGELQKGNELALPSKYVNFLYLASHYEKLKGSPEDNEQKQLFVEQHKHYLDEIIEQISEFSKRVILADANLDKVLSAYNKHRDKPIREQAENIIHLFTLTNLGAPAAFKYFDTTIDRKRYTSTKEVLDATLIHQSITGLYETRIDLSQLGGDGGAEAAAKEAAAKEAAAKEAAAKALEAEAAAKEAAAKEAAAKEAAAKAGGVPWLMKKPLQLTVLVPLHEYQERLLQQTALPKEQKELLQKLFLKYDALWQHWENQVGHRRIKPHNIATGTLAPRPQKQYPINPKAKPSIQIVIDDLLKQGVLIQQNSTMNTPVYPVPKPDGKWRMVLDYREVNKTIPLIAAQNQHSAGILSSIYRGKYKTTLDLTNGFWAHPITPESYWLTAFTWQGKQYCWTRLPQGFLNSPALFNADVVDLLKEIPNVQAYVDDIYISHDDPQEHLEQLEKIFSILLNAGYVVSLKKSEIAQREVEFLGFNITKEGRGLTDTFKQKLLNITPPKDLKQLQSILGLLNFARNFIPNYSELVKPLYTIVAPANGKFISWTEDNSNQLQHIISVLNQADNLEERNPETRLIIKVNSSPSAGYIRYYNEGSKRPIMYVNYIFSKAEAKFTQTEKLLTTMHKGLIKAMDLAMGQEILVYSPIVSMTKIQRTPLPERKALPVRWITWMTYLEDPRIQFHYDKSLPELQQIPNVTEDVIAKTKHPSEFAMVFYTDGSAIKHPDVNKSHSAGMGIAQVQFIPEYKIVHQWSIPLGDHTAQLAEIAAVEFACKKALKISGPVLIVTDSFYVAESANKELPYWKSNGFLNNKKKPLRHVSKWKSIAECLQLKPDIIIMHEKGHQQPMTTLHTEGNNLADKLATQGSYVVHAGKRTADGSEFEKRTADGSEFESPKKKAKVEGSGEGRGSLLTCGDVEENPG

SEQ ID NO: 3781 - RNA, 100 nt, synthetic construct; identical to SEQ ID NO: 1683
  source 1..100: mol_type = other RNA
  misc_difference 1..100: note = This sequence may encompass 5, 10, 20, 30, 50, 70, or 100 nucleotides

SEQ ID NO: 3782 - RNA, 80 nt, synthetic construct
  source 1..80: mol_type = other RNA
aaaaaaaaaaaaaaaaaaaaaaaaaaaaaaaaaaaaaaaaaaaaaaaaaaaaaaaaaaaaaaaaaaaaaaaaaaaaaaaa
